(19) United States
(12) Patent Application Publication
(10) Pub. No.: US 2022/0064671 A1
(43) Pub. Date: Mar. 3, 2022

(54) METHODS AND SYSTEMS FOR PRODUCING AAV PARTICLES

(71) Applicant: VOYAGER THERAPEUTICS, INC., Cambridge, MA (US)

(72) Inventors: Luis Maranga, Cambridge, MA (US); Christopher J. Morrison, Cambridge, MA (US); Krishanu Mathur, Cambridge, MA (US); Matthew Luther, Cambridge, MA (US); Daniel S. Hurwit, Cambridge, MA (US); Jacob J. Cardinal, Cambridge, MA (US); Lori B. Karpes, Ashland,, MA (US); Aditya Ansondaria, Cambridge, MA (US); James Forster, Cambridge, MA (US); David Dismuke, Cary, NC (US); Robert Steininger, Cambridge, MA (US)

(21) Appl. No.: 17/423,737

(22) PCT Filed: Jan. 17, 2020
(86) PCT No.: PCT/US2020/014000

§ 371 Date: Jul. 16, 2021

Related U.S. Application Data
(60) Provisional application No. 62/931,848, filed on Nov. 7, 2019.
(60) Provisional application No. 62/794,216, filed on Jan. 18, 2019.
(60) Provisional application No. 62/794,204, filed on Jan. 18, 2019.
(60) Provisional application No. 62/794,208, filed on Jan. 18, 2019.
(60) Provisional application No. 62/794,199, filed on Jan. 18, 2019.

(51) Int. Cl. C12N 15/86; A61K 48/00

(52) U.S. Cl. CPC C12N 15/86; C12N 2750/14143; C12N 2750/14151; A61K 48/005

(57) ABSTRACT

The present disclosure describes methods and systems for use in the production of adeno-associated virus (AAV) particles, comprising recombinant adeno-associated virus (rAAV) particles. In certain embodiments, the production process and system use Sf9 insect cells as viral production cells. In certain embodiments, the production process and system use Baculoviral Expression Vectors (BEVs) and Baculoviral Infected Insect Cells (BIICs) in the production of AAV particles.

### CROSS REFERENCE TO RELATED APPLICATIONS

[0001] This application claims the benefit of: U.S. Provisional Patent Application No. 62/794,199, filed Jan. 18, 2019, entitled METHODS AND SYSTEMS FOR PRODUCING AAV PARTICLES; U.S. Provisional Patent Application No. 62/794,204, filed Jan. 18, 2019, entitled METHODS AND SYSTEMS FOR PRODUCING AAV PARTICLES; U.S. Provisional Patent Application No. 62/794,208, filed Jan. 18, 2019, entitled METHODS AND SYSTEMS FOR PRODUCING AAV PARTICLES; U.S. Provisional Patent Application No. 62/794,216, filed Jan. 18, 2019, entitled BBC COMPOSITIONS FOR PRODUCING AAV PARTICLES; U.S. Provisional Patent Application No. 62/931,848, filed Nov. 07, 2019, entitled METHODS AND SYSTEMS FOR PRODUCING AAV PARTICLES; the contents of which are each incorporated herein by reference in their entireties.

### REFERENCE TO THE SEQUENCE LISTING

[0002] The present application is being filed along with a Sequence Listing in electronic format. The Sequence Listing is provided as a file entitled 20571526PCTSL.txt, created on Jan. 17, 2020, which is 6,478,295 bytes in size. The information in the electronic format of the sequence listing is incorporated herein by reference in its entirety.

### FIELD OF THE DISCLOSURE

[0003] The present disclosure describes methods and systems for use in the production of adeno-associated virus (AAV) particles, compositions and formulations, comprising recombinant adeno-associated viruses (rAAV). In certain embodiments, the present disclosure presents methods and systems for designing, producing, clarifying, purifying, formulating, filtering and processing rAAVs and rAAV formulations. In certain embodiments, the production process and system use Spocloptera frugipercla insect cells (such as Sf9 or Sf21) as viral production cells. In certain embodiments, the production process and system use Baculoviral Expression Vectors (BEVs) and/or Baculoviral Infected Insect Cells (BIICs) in the production of rAAVs.

### BACKGROUND

[0004] AAVs have emerged as one of the most widely studied and utilized viral vectors for gene transfer to mammalian cells. See, e.g., Tratschin et al., Mol. Cell Biol., 5(11):325-3260 (1985) and Grimm et al., Hum. Gene Ther., 10(15):2445-2450 (1999), the contents of which are each incorporated herein by reference in their entireties insofar as they do not conflict with the present disclosure. Adeno-associated viral (AAV) vectors are promising candidates for therapeutic gene delivery and have proven safe and efficacious in clinical trials. The design and production of improved AAV particles for this purpose is an active field of study.

[0005] There remains a need for improved systems and methods for producing AAV capsids proteins, AAV capsids, and corresponding AAV vectors (such as AAV particles).

### SUMMARY

[0006] The present disclosure presents methods and systems for producing recombinant adeno-associated viruses (rAAVs).

[0007] In certain embodiments, the method for producing a recombinant adeno-associated virus AV) comprises one or more of the following steps: (a) introducing at least one viral production cell (VPC) into a bioreactor and expanding the number of VPCs in the bioreactor to a target VPC cell density, (b) introducing into the bioreactor at least one expression baculovirus infected insect cell (BIIC) which comprises an AAV viral expression construct and at least one payload BIIC which comprises an AAV payload construct; (c) incubating the mixture of VPCs, expression BIICs and payload BIICs in the bioreactor under conditions which result in the production of one or more rAAVs within one or more of the VPCs; (d) harvesting a viral production pool from the bioreactor, wherein the viral production pool comprises a liquid media and the one or more VPCs containing the one or more rAAVs, (e) exposing the one or more VPCs within the viral production pool to chemical lysis using a chemical lysis solution under chemical lysis conditions, wherein the chemical lysis releases the one or more rAAVs from the VPCs into the liquid media of the viral production pool; (f) processing the viral production pool through one or more clarification filtration steps in which the viral production pool is processed through one or more clarification filtration systems; (g) processing the viral production pool through one or more affinity chromatography steps in which the viral production pool is processed through one or more affinity chromatography systems; (h) processing the viral production pool through one or more ion exchange chromatography steps in which the viral production pool is processed through one or more ion exchange chromatography systems; (i) processing the viral production pool through one or more tangential flow filtration (TFF) steps in which the viral production pool is processed through one or more tangential flow filtration (TFF) systems; and (h) processing the viral production pool through one or more virus retentive filtration (VRF) steps in which the viral production pool is processed through one or more virus retentive filtration (VRF) systems.

[0008] In certain embodiments, the rAAVs are produced in viral production cells (VPCs) within a bioreactor. In certain embodiments, the volume of the bioreactor is at least 5 L, 10 L, 20 L, 50 L, 100 L, or 200 L. In certain embodiments, the VPCs comprise insect cells. In certain embodiments, the VPCs comprise Sf9 insect cells. In certain embodiments, the rAAVs are produced using a baculovinis production system.

[0009] In certain embodiments, the target VPC cell density at BIIC introduction is 2.0-4.0×10⁶ cells/mL, 2.5-3.5×10⁶ cells/mL, or about 3.0-10⁶ cells/mL. In certain embodiments, the ratio of VPC cells at RUC introduction relative to the number of expression BIICs introduced into the bioreactor is between 1:2.0×1.0⁵-1:4.0×1.0⁵ v/v. between 1:2.5×1.0⁵-1:3.5×10⁵ v/v, about 1:2.5×10⁵ v/v, about 1:3.0×10⁵ v/v, about 1:3.5×10⁵ v/v, or about 1:4.0×10⁵ v/v. In certain embodiments, the ratio of VPC cells at BIIC introduction relative to the number of payload BACs introduced into the bioreactor is between 1:5.0×10⁴−2.0×1.0⁵ v/v, between 1:8.0×10⁴-1:1.5×10⁵ v/v, about 1:8.0×10⁴ v/v, about 1:1.0×10⁵ v/v, or about 1:1.5×10⁵ v/v. In certain embodiments, the ratio of expression BACs introduced into the bioreactor relative payload BACs introduced into the bioreactor is between 1:1-5:1, between 2:1-4:1, between 2.5:1-3.5:1, or about 3:1.

[0010] In certain embodiments, the method comprises one or more chemical lysis steps in which the viral production pool is exposed to chemical lysis. In certain embodiments, the method comprises: harvesting the viral production pool from the bioreactor, wherein the viral production pool comprises a liquid media and the one or more VPCs containing the one or more rAAVs; and exposing the one or more VPCs within the viral production pool to chemical lysis using a chemical lysis solution under chemical lysis conditions, wherein the chemical lysis releases the one or more rAAVs from the VPCs into the liquid media of the viral production pool. In certain embodiments, the chemical lysis solution comprises a stabilizing additive selected from arginine and salts thereof.

[0011] In certain embodiments, the method comprises one or more clarification filtration steps in which the viral production pool is processed through one or more clarification filtration systems. In certain embodiments, the one or more clarification filtration steps comprises processing the viral production pool through a depth filtration system, a 0.2 μm microfiltration system, or a combination thereof In certain embodiments, the one or more clarification filtration steps comprises processing the viral production pool through a depth filtration system and then a 0.2 μm microfiltration system. In certain embodiments, the one or more clarification filtration steps comprises processing the viral production pool through a first depth filtration system, then a second depth filtration system, and then a 0.2 μm microfiltration system.

[0012] In certain embodiments, the method comprises one or more affinity chromatography steps in which the viral production pool is processed through one or more affinity chromatography systems. In certain embodiments, the method comprises processing the viral production pool through one or more immunoaffinity chromatography systems in bind-elute mode. In certain embodiments, the immunoaffinity chromatography system comprises one or more recombinant single-chain antibodies which are capable of binding to one or more AAV capsid variants. In certain embodiments, the affinity chromatography system comprises an AVB column resin, AAV9 column resin or AAVX column resin.

[0013] In certain embodiments, the method comprises one or more ion exchange chromatography steps in which the viral production pool is processed through one or more ion exchange chromatography systems. In certain embodiments, the method comprises processing the viral production pool through one or more anion exchange chromatography systems in flow-through mode. In certain embodiments, the anion exchange chromatography system comprises a stationary phase which hinds non-viral impurities, non-AAV viral particles, or a combination thereof In certain embodiments, the anion exchange chromatography system comprises a stationary phase which does not bind to the one or more rAAVs in the viral production pool. In certain embodiments, the stationary phase of the anion exchange chromatography system comprises a quaternary amine functional group. In certain embodiments, the anion exchange chromatography system comprises a trimethylammonium ethyl (MME) functional group.

[0014] In certain embodiments, the method comprises one or more tangential flow filtration (TFF) steps in which the viral production pool is processed through one or more TFF systems. In certain embodiments, a 50% sucrose mixture is added to the viral production pool prior to the one or more TFT steps. In certain embodiments, the 50% sucrose mixture is added to the viral production pool at a centration between 9-13% v/v prior to the one or more TFF steps. In certain embodiments, the 50% sucrose mixture is added to the viral production pool at a centration between 10-12% v/v prior to the one or more TFF steps. In certain embodiments, the 50% sucrose mixture is added to the viral production pool at a centration of 11% v/v prior to the one or more TFF steps.

[0015] In certain embodiments, the one or more TFF steps comprises a first diafiltration step in which at least a portion of the liquid media of the viral production pool is replaced with a low-sucrose diafiltration buffer. In certain embodiments, the low-sucrose diafiltration buffer comprises between 4-6% w/v of a sugar or sugar substitute and between 150-250 mM of an alkali chloride salt. In certain embodiments, the low-sucrose diafiltration buffer comprises between 4.5-5.5% w/v of sucrose and between 210-230 mM sodium chloride. In certain embodiments, the low-sucrose diafiltration buffer comprises 5% w/v of sucrose and 220 mM sodium chloride.

[0016] In certain embodiments, the one or more TFF steps comprises an ultrafiltration concentration step, wherein the AAV particles in the viral production pool are concentrated to a target particle concentration. In certain embodiments, the AAV particles in the viral production pool are concentrated to between 1.0×10¹²-5.0×10¹³ vg/mL. In certain embodiments, the AAV particles in the viral production pool are concentrated to between 2.0×10¹² -5.0×10¹² vg/mL. In certain embodiments, the AAV particles in the viral production pool are concentrated to between 1.0×10′³-5.0×10¹³ vg/mL. In certain embodiments, the AAV particles in the viral production pool are concentrated to between 2.0×10¹³-3.0×10¹³ g/mL. In certain embodiments, the AAV particles in the viral production pool are concentrated to 2.7×10¹³ vg/mL.

[0017] In certain embodiments, the one or more TFF steps comprises a formulation diafiltration step in which at least a portion of the liquid media of the viral production pool is replaced with a high-sucrose formulation buffer. In certain embodiments, the high-sucrose formulation buffer comprises between 6-8% w/v of a sugar or sugar substitute and between 90-100 mM of an alkali chloride salt. In certain embodiments, the high-sucrose formulation buffer comprises 7% w/v of sucrose and between 90-100 mM sodium chloride. In certain embodiments, the high-sucrose formulation buffer comprises 7% w/v of sucrose, 10 mM Sodium Phosphate, between 95-100 mM sodium chloride, and 0.001% (w/v) Poloxamer 188. In certain embodiments, the formulation diafiltration step is the final diafiltration step in the one or more TFF steps. in certain embodiments, the formulation diafiltration step is the only diafiltration step in the one or more TFF steps.

[0018] In certain embodiments, the method comprises one or more virus retentive filtration (VRF) steps in which the viral production pool is processed through one or more VRF systems, In certain embodiments, the VRF system comprises a filter medium which retains particles which are 50 nm or larger. In certain embodiments, the VRF system comprises a filter medium which retains particles which are 35 nm or larger. In certain embodiments, the VRF system comprises a filter medium which retains particles which are 20 nm or larger.

[0019] The present disclosure presents methods and systems for producing a pharmaceutical formulation by: (i) providing one or more rAAVs produced by a method or system of the present disclosure; and (ii) combining the one or more rAAVs with one or more one pharmaceutical excipient. The present disclosure presents pharmaceutical formulations produced by a method or system of the present disclosure.

[0020] The present disclosure presents methods and systems for producing a gene therapy product by: (i) providing a pharmaceutical formulation comprising rAAVs of the present disclosure, wherein the pharmaceutical formulation and/or rAAVs are produced by a method or system of the present disclosure; and (ii) suitably aliquoting the pharmaceutical formulation into a formulation container.

[0021] The present disclosure presents pharmaceutical formulations useful for gene therapy modalities. In certain embodiments, the pharmaceutical formulations comprise rAAVs of the present disclosure. In certain embodiments, the pharmaceutical formulations comprise rAAVs at a concentration less than 5×10¹³ vg/ml. In certain embodiments, the pharmaceutical formulations comprise rAAVs at a concentration between 1.0×10¹²-5.0×10¹³ vg/mL. In certain embodiments, the pharmaceutical formulations comprise rAAVs at a concentration between 1.0×10¹² 5.0×10¹² vg/mL. In certain embodiments, the pharmaceutical formulations comprise rAAVs at a concentration between 1.0×10¹³-5×10¹³ vg/mL. In certain embodiments, the pharmaceutical formulations comprise rAAVs at a concentration of 2.7×10¹³ vg/mL.

### BRIEF DESCRIPTION OF THE FIGURES

[0022] The foregoing and other objects, features and advantages will be apparent from the following description of particular embodiments of the present disclosure, as illustrated in the accompanying figures. The figures are not necessarily to scale or comprehensive, with emphasis instead being placed upon illustrating the principles of various embodiments of the present disclosure,

[0023] FIG. 1 shows a schematic for one embodiment of a system, and a flow diagram for one embodiment of a process, for producing baculovirus infected insect cells (BIICs) using Viral Production Cells (VPC) and plasmid constructs,

[0024] FIG. 2 shows a schematic for one embodiment of a system, and a flow diagram for one embodiment of a process, for producing AAV Particles using Viral Production Cells (VPC) and baculovinis infected insect cells (BIICs).

[0025] FIG. 3 shows schematic for one embodiment of a system, and a flow diagram for one embodiment of a process, for producing a Drug Substance by processing, clarifying and purifying a bulk harvest of AAV particles and Viral Production Cells.

[0026] FIG. 4A and FIG. 49 show the results of computer modeling for BIIC^{Rep/CaP} cell count (y-axis) vs. BIIC^{ReP/CaP}-to-BIIC^{Payload} v/v ratio (x-axis) in BIIC transfection of viral production cells (VPC). FIG. 4A shows AAV titer (vg/mL) using ddPCR, and FIG. 4B shows Capsid Full %.

[0027] FIG. 5A and FIG. 5B show the results of computer modeling for BIIC^{ReP/Cap} cell count (y-axis) vs. VPC cells/mL (x-axis, ×10⁶) in BIIC transfection of viral production cells (VPC). FIG. 5A shows AAV titer (vg/mL) using ddPCR and FIG. 5B shows Capsid

[0028] FIG. 6A and FIG. 6B show the results of computer modeling for BIIC^{Rep/Cap}-to-BIIC^{Payload} v/v ratio (y-axis) vs. VPC cells/mL (x-axis, ×10⁶) in BIIC transfection of viral production cells (VPC). FIG. 6A shows AAV titer (vg/mL) using ddPCR, and FIG. 6B shows Capsid Full %.

### DETAILED DESCRIPTION

### I. ADENO-ASSOCIATED VIRUSES (AAVs)

### Overview

[0029] Adeno-associated viruses (AAV) are small non-enveloped icosahedral capsid viruses of the Parvoviridae family characterized by a single stranded DNA viral genome. Parvoviridae family viruses consist of two subfamilies: Parvovirinae, which infect vertebrates, and Densovirinae, which infect invertebrates. The Parvoviridae family comprises the Dependovirus genus which comprises AAV, capable of replication in vertebrate hosts comprising, but not limited to, human, primate, bovine, canine, equine, and ovine species.

[0030] The parvoviruses and other members of the Parvoviridae family are generally described in Kenneth I. Berns, “Parvoviridae: The Viruses and Their Replication,” Chapter 69 in Fields Virology (3d Ed. 1996), the content of which is incorporated herein by reference in its entirety as related to parvoviruses, insofar as it does not conflict with the present disclosure.

[0031] AAV have proven to be useful as a biological tool due to their relatively simple structure, their ability to infect a wide range of cells (comprising quiescent and dividing cells) without integration into the host genome and without replicating, and their relatively benign immunogenic profile. The genome of the virus may be manipulated to contain a minimum of components for the assembly of a functional recombinant virus, or viral particle, which is loaded with or engineered to target a particular tissue and express or deliver a desired payload.

### AAV Viral Genomes

[0032] The wild-type AAV viral genome is a linear, single-stranded DNA (ssDNA) molecule approximately 5,000 nucleotides (nt) in length. Inverted terminal repeats (ITRs) traditionally cap the viral genome at both the 5′ and the 3′ end, providing origins of replication for the viral genome. While not wishing to be bound by theory, an AAV viral genome typically comprises two ITR sequences. These ITRs have a characteristic T-shaped hairpin structure defined by a self-complementary region (145 nt in wild-type AAV) at the 5′ and 3′ ends of the ssDNA which form an energetically stable double stranded region. The double stranded hairpin structures comprise multiple functions comprising, but not limited to, acting as an origin for DNA replication by functioning as primers for the endogenous DNA polymerase complex of the host viral replication cell.

[0033] The wild-type AAV viral genome further comprises nucleotide sequences for two open reading frames, one for the four non-structural Rep proteins (Rep78, Rep68, Rep52, Rep40, encoded by Rep genes) and one for the three capsid, or structural, proteins (VP1, VP2, VP3, encoded by capsid genes or Cap genes). The Rep proteins are important for replication and packaging, while the capsid proteins are assembled to create the protein shell of the AAV, or AAV capsid. Alternative splicing and alternate initiation codons and promoters result in the generation of four different Rep proteins from a single open reading frame and the generation of three capsid proteins from a single open reading frame. Though it varies by AAV serotype, as a non-limiting example, for AAV9/hu.14 (SEQ NO: 123 of U.S. Pat. No. 7,906,111, the content of which is incorporated herein by reference in its entirety as related to AAV9/hu.14, insofar as it does not conflict with the present disclosure) VP1 refers to amino acids 1-736, \/P2 refers to amino acids 138-736, and VP3 refers to amino acids 203-736. In other words, VPT is the full-length capsid sequence, while VP2 and VP3 are shorter components of the whole. As a result, changes in the sequence in the VP3 region, are also changes to VP1 and VP2, however, the percent difference as compared to the parent sequence will be greatest for \/P3 since it is the shortest sequence of the three. Though described here in relation to the amino acid sequence, the nucleic acid sequence encoding these proteins can be similarly described. Together, the three capsid proteins assemble to create the AAV capsid protein. While not wishing to be bound by theory, the AAV capsid protein typically comprises a molar ratio of 1:1:10 of VP1:VP2:VP3. As used herein, an “AAV serotype” is defined primarily by the AAV capsid. In some instances, the ITRs are also specifically described by the AAV serotype (e.g., AAV2/9).

[0034] For use as a biological tool, the wild-type AAV viral genome can be modified to replace the rep/cap sequences with a nucleic acid sequence comprising, a payload region with at least one ITR region. Typically, in recombinant AAV viral genomes there are two ITR regions. The rep/cap sequences can be provided in trans during production to generate AAV particles.

[0035] In addition to the encoded heterologous payload, AAV vectors may comprise the viral genome, in whole or in part, of any naturally occurring and/or recombinant AAV serotype nucleotide sequence or variant. AAV variants may have sequences of significant homology at the nucleic acid (genome or capsid) and amino acid levels (capsids), to produce constructs which are generally physical and functional equivalents, replicate by similar mechanisms, and assemble by similar mechanisms. See Chiorini et al., J. Vir. 71: 6823-33(1997); Srivastava et al., J. Vir. 45:555-64 (1983); Chiorini et al., J. Vir. 73:1309-1319 (1999); Rutledge et al., J. Vir. 72:309-319 (1998); and Wu et al., J. Vir. 74: 8635-47 (2000), the contents of each of which are incorporated herein by reference in their entireties as related to AAV variants and equivalents, insofar as they do not conflict with the present disclosure.

[0036] In certain embodiments, AAV particles, viral genomes and/or payloads of the present disclosure, and the methods of their use, may be as described in WO2017189963, the content of which is incorporated herein by reference in its entirety as related to AAV particles, viral genomes and/or payloads, insofar as it does not conflict with the present disclosure.

[0037] AAV particles of the present disclosure may he formulated in any of the gene therapy formulations of the disclosure comprising any variations of such formulations apparent to those skilled in the art. The reference to “AAV particles”, “AAV particle formulations” and “formulated AAV particles” in the present application refers to the AAV particles which may be formulated and those which are formulated without limiting either.

[0038] In certain embodiments, AAV particles of the present disclosure are recombinant AAV (rAAV) viral particles which are replication defective, lacking sequences encoding functional Rep and Cap proteins within their viral genome. These defective AAV particles may lack most or all parental coding sequences and essentially carry only one or two AAV ITR sequences and the nucleic acid of interest (i.e. payload) for delivery to a cell, a tissue, an organ or an organism.

[0039] In certain embodiments, the viral genome of the AAV particles of the present disclosure comprises at least one control element which provides for the replication, transcription and translation of a coding sequence encoded therein. Not all of the control elements need always be present as long as the coding sequence is capable of being replicated, transcribed and/or translated in an appropriate host cell. Non-limiting examples of expression control elements comprise sequences for transcription initiation and/or termination, promoter and/or enhancer sequences, efficient RNA processing signals such as splicing and polyadenylation signals, sequences that stabilize cytoplasmic mRNA, sequences that enhance translation efficacy (e.g., Kozak consensus sequence), sequences that enhance protein stability, and/or sequences that enhance protein processing and/or secretion.

[0040] According to the present disclosure, AAV particles for use in therapeutics and/or diagnostics comprise a virus that has been distilled or reduced to the minimum components necessary for transduction of a nucleic acid payload or cargo of interest. In this manner, AAV particles are engineered as vehicles for specific delivery while lacking the deleterious replication and/or integration features found in wild-type viruses.

[0041] AAV particles of the present disclosure may be produced recombinantly and may be based on adeno-associated virus (AAV) parent or reference sequences. As used herein, a “vector” is any molecule or moiety which transports, transduces or otherwise acts as a carrier of a heterologous molecule such as the nucleic acids described herein.

[0042] In addition to single stranded AAV viral genomes (e.g., ssAAVs), the present disclosure also provides for self-complementary AAV (scAAVs) viral genomes. scAAV vector genomes contain DNA strands which anneal together to form double stranded. DNA. By skipping second strand synthesis, scAAVs allow for rapid expression in the cell.

[0043] In certain embodiments, the AAV viral genome of the present disclosure is a scAAV. In certain embodiments, the AAV viral genome of the present disclosure is a ssAAV.

[0044] Methods for producing and/or modifying AAV particles are disclosed in the art, such as pseudotyped AAV particles (KT Patent Publication Nos. WO200028004; WO200123001; WO2004112727; WO 2005005610 and WO 2005072364, the contents of each of which are incorporated herein by reference in their entireties as related to producing and/or modifying AAV particles, insofar as they do not conflict with the present disclosure)

[0045] AAV particles may be modified to enhance the efficiency of delivery. Such modified AAV particles can he packaged efficiently and be used to successfully infect the target cells at high frequency and with minimal toxicity. In certain embodiments the capsids of the AAV particles are engineered according to the methods described in US Publication Number US 20130195801, the content of which is incorporated herein by reference in its entirety as related to modifying AAV particles to enhance the efficiency of delivery, insofar as it does not conflict with the present disclosure.

[0046] In certain embodiments, the AAV particles comprise a payload region encoding a polypeptide or protein of the present disclosure, and may be introduced into mammalian cells.

### Inverted Terminal Repeats (ITRs)

[0047] The AAV particles of the present disclosure comprise a viral genome with at least one ITR region and a payload region. In certain embodiments, the viral genome has two ITRs. These two ITRs flank the payload region at the 5′ and 3′ ends. The ITRs function as origins of replication comprising recognition sites for replication. ITRs comprise sequence regions which can be complementary and symmetrically arranged. ITRs incorporated into viral genomes of the present disclosure may be comprised of naturally occurring polynucleotide sequences or recombinantly derived polynucleotide sequences.

[0048] The ITRs may be derived from the same serotype as the capsid, or a derivative thereof. The ITR may be of a different serotype than the capsid. In certain embodiments, the AAV particle has more than one ITR. In a non-limiting example, the AAV particle has a viral genome comprising two ITRs. In certain embodiments, the ITRs are of the same serotype as one another. In another embodiment, the ITRs are of different serotypes. examples comprise zero, one or both of the ITRs having the same serotype as the capsid, In certain embodiments both ITRs of the viral genome of the AAV particle are AAV2 ITRs.

[0049] Independently, each ITR may be about 100 to about 150 nucleotides in length. An ITR may be about 100-105 nucleotides in length, 106-110 nucleotides in length, 111-115 nucleotides in length, 116-120 nucleotides in length, 121-125 nucleotides in length, 126-130 nucleotides in length, 131-135 nucleotides in length, 136-140 nucleotides in length, 141-145 nucleotides in length or 146-150 nucleotides in length. In certain embodiments, the ITRs are 140-142 nucleotides in length. Non-limiting examples of ITR length are 102, 130, 140, 141, 142, 145 nucleotides in length, and those having at least 95% identity thereto.

[0050] In certain embodiments, each ITR may be 141 nucleotides in length. In certain embodiments, each ITR may be 130 nucleotides in length. In certain embodiments, each ITR may be 119 nucleotides in length.

[0051] In certain embodiments, the AAV particles comprise two ITRs and one ITR is 141 nucleotides in length and the other ITR is 130 nucleotides in length. In certain embodiments, the AAV particles comprise two ITRs and both ITRs are 141 nucleotides in length.

[0052] Independently, each ITR may be about 75 to about 175 nucleotides in length. The ITR may, independently, have a length such as, but not limited to, 75, 76, 77, 78, 79, 80, 81, 82, 83, 84, 85, 86, 87, 88, 89, 90, 91, 92, 93, 94, 95, 96, 97, 98, 99, 100, 101, 102, 103, 104, 105, 106, 107, 108, 109, 110, 111, 112, 113, 114, 115, 116, 117, 118, 119, 120, 121, 122, 123, 124, 125, 126, 127, 128, 129, 130, 131, 132, 133, 134, 135, 136, 137, 138, 139, 140, 141, 142, 143, 144, 145, 146, 147, 148, 149, 150, 151, 152, 153, 154, 155, 156, 157, 158, 159, 160, 161, 162, 163, 164, 165, 166, 167, 168, 169, 170, 171, 172, 173, 174, and 175 nucleotides. The length of the ITR for the viral genome may be 75-80, 75-85, 75-100, 80-85, 80-90, 80-105, 85-90, 85-95, 85-110, 90-95, 90-100, 90-115, 95-100, 95-105, 95-120, 100-105, 100-110, 100-125, 105-110, 105-115, 105-130, 110-115, 110-120, 110-135, 115-120, 115-125, 115-140, 120-125, 120-130, 120-145, 125-130, 125-135, 125-150, 130-135, 130-140, 130-155, 135-140, 135-145, 135-160, 140-145, 140-150, 140-165, 145-150, 145-155, 145-170, 150-155, 150-160, 150-175, 155-160, 155-165, 160-165, 160-170, 165-170, 165-175, and 170-175 nucleotides. As a non-limiting example, the viral genome comprises an ITR that is about 105 nucleotides in length. As a non-limiting example, the viral genome comprises an ITR that is about 141 nucleotides in length. As a non-limiting example, the viral genome comprises an ITR that is about 130 nucleotides in length. As a non-limiting example, the viral genome comprises an ITR that is about 105 nucleotides in length and an ITR that is about 141 nucleotides in length. As a non-limiting example, the viral genome comprises an ITR that is about 105 nucleotides in length and an Ha that is about 130 .nucleotides in length. As a non-limiting example, the viral genome comprises an ITR that is about 130 nucleotides in length and an ITR that is about 141 nucleotides in length. As a non-limiting example, the viral genome may comprise two ITRs, each of which are about 141 nucleotides in length.

### Promoters

[0053] In certain embodiments, the payload region of the viral genome comprises at least one clement to enhance the transgene target specificity and expression (See e.g., Powell et al. Viral Expression Cassette Elements to Enhance Transgene Target Specificity and Expression in Gene Therapy, 2015; the content of which is incorporated herein by reference in its entirety as related to payload/transgene enhancer elements, insofar as it does not conflict with the present disclosure). Non-limiting examples of elements to enhance the transgene target specificity and expression comprise promoters, endogenous miRNAs, post-transcriptional regulatory elements (PREs), polyadenylation (PolyA) signal sequences and upstream enhancers (USEs), CMV enhancers and introns.

[0054] A person skilled in the art may recognize that expression of the polypeptides of the present disclosure in a target cell may require a specific promoter, comprising but not limited to, a promoter that is species specific, inducible, tissue-specific, or cell cycle-specific (see Parr et al., Nat. Med. 3:1145-9 (1997); the content of which is incorporated herein by reference in its entirety as related to polypeptide expression promoters, insofar as it does not conflict with the present disclosure).

[0055] In certain embodiments, the promoter is deemed to be efficient when it drives expression of the polypeptide(s) encoded in the payload region of the viral genome of the AAV particle. In certain embodiments, the promoter is deemed to be efficient when it drives expression in the cell being targeted. In certain embodiments, the promoter has a tropism for the cell being targeted. In certain embodiments, the promoter has a tropism for a viral production cell.

[0056] In certain embodiments, the promoter drives expression of the payload for a period of time in targeted cells or tissues. Expression driven by a promoter may be for a period of 1-31 days (or any value or range therein), 1-23 months (or any value or range therein), 2-10 years (or any value or range therein), or more than 10 years. Expression may be for 1-5 hours, 1-12 hours, 1-2 days, 1-5 days, 1-2 weeks, 1-3 weeks, 1-4 weeks, 1-2 months, 1-4 months, 1-6 months, 2-6 months, 3-6 months, 3-9 months, 4-8 months, 6-12 months, 1-2 years, 1-5 years, 2-5 years, 3-6 years, 3-8 years, 4-8 years or 5-10 years. As a non-limiting example, the promoter can be a weak promoter for sustained expression of a payload in nervous (e.g. CNS) cells or tissues.

[0057] In certain embodiments, the promoter drives expression of the polypeptides of the present disclosure for at least 1-11 months (or any individual value therein), 2-65 years any individual value therein), or more than 65 years,

[0058] Promoters may be naturally occurring or non-naturally occurring. Non-limiting examples of promoters comprise viral promoters, plant promoters and mammalian promoters. In certain embodiments, the promoters may be human promoters. In certain embodiments, the promoter may be truncated or mutated.

[0059] Promoters which drive or promote expression in most tissues comprise, but are not limited to, human elongation factor 1α-subunit (EF1α), cytomegalovirus (CMV) immediate-early enhancer and/or promoter, chicken β-actin (CBA) and its derivative CAG, β glucuronidase (GUSB), or ubiquitin C (UBC). Tissue-specific expression elements can be used to restrict expression to certain cell types such as, but not limited to, muscle specific promoters, B cell promoters, monocyte promoters, leukocyte promoters, macrophage promoters, pancreatic acinar cell promoters, endothelial cell promoters, lung tissue promoters, astrocyte promoters, or nervous system promoters which can be used to restrict expression to neurons or subtypes of neurons, astrocytes, or oligodendrocytes.

[0060] Non-limiting examples of muscle-specific promoters comprise mammalian muscle creatine kinase (MCK) promoter, mammalian desmin (DES) promoter, mammalian troponin I (TNNI2) promoter, and mammalian skeletal alpha-actin (ASKA) promoter (see, e.g. U.S. Patent Publication US 20110212529, the content of which is incorporated herein by reference in its entirety as related to muscle-specific promoters, insofar as they do no conflict with the present disclosure)

[0061] Non-limiting examples of tissue-specific expression elements for neurons comprise neuron-specific enolase (NSE), platelet-derived growth factor (PDGF), platelet-derived growth factor B-chain (PDGF-β), synapsin (Syn), methyl-CpG binding protein 2 (MeCP2), Ca²⁺/calmodulin-dependent protein kinase II (CaMKII), metabotropic glutamate receptor 2 (mGluR2), neurofilament light chain (NFL) or neurofilament heavy chain (NTH), β-globin minigene nβ2, preproenkephalin (PPE), enkephalin (Enk) and excitatory amino acid transporter 2 (EAAT2) promoters. Non-limiting examples of tissue-specific expression elements for astrocytes comprise glial fibrillary acidic protein (GFAP) and EAAT2 promoters. A non-limiting example of a tissue-specific expression element for oligodendrocytes comprises the myelth basic protein (MBP) promoter.

[0062] In certain embodiments, the promoter may be less than 1 kb, The promoter may have a length of 200-800 nucleotides (or any value or range therein), or more than 800 nucleotides. The promoter may have a length between 200-300, 200-400, 200-500, 200-600, 200-700, 200-800, 300-400, 300-500, 300-600, 300-700, 300-800, 400-500, 400-600, 400-700, 400-800, 500-600, 500-700, 500-800, 600-700, 600-800 or 700-800.

[0063] The AAV particles of the present disclosure comprise a viral genome with at least one promoter region. The promoter region(s) may, independently, have a length such as, but not limited to, 4, 5, 6, 7, 8, 9, 10, 11, 12, 13. 14, 15, 16, 17, 18, 19, 20, 21, 22, 23, 24, 25, 26, 27, 28, 29, 30, 31, 32, 33, 34, 35, 36, 37, 38, 39, 40, 41, 42, 43, 44, 45, 46, 47, 48, 49, 50, 51, 52, 53, 54, 55, 56, 57, 58, 59, 60, 61, 62, 63, 64, 65, 66, 67, 68, 69, 70, 71, 72, 73, 74, 75, 76, 77, 78, 79, 80, 81, 82, 83, 84, 85, 86. 87, 88, 89, 90, 91, 92, 93. 94, 95, 96, 97, 98, 99, 100, 101, 102, 103, 104, 105, 106, 107, 108, 109, 110, 111, 112, 113, 114, 115, 116, 117, 118, 119, 120, 121, 122, 123, 124, 125, 126, 127, 128, 129, 130, 131, 132, 133, 134, 135, 136, 137, 138, 139, 140, 141, 142, 143, 144, 145,146, 147, 148, 149, 150, 151, 152, 153, 154, 155, 156, 157, 158, 159, 160, 161, 162, 163, 164, 165, 166, 167, 168, 169, 170, 171, 172, 173, 174, 175, 176, 177, 178, 179, 180, 181, 182, 183, 184, 185, 186, 187, 188, 189, 190, 191, 192, 193, 194, 195, 196, 197, 198, 199, 200, 201, 202, 203, 204, 205, 206, 207, 208, 209, 210, 211, 212. 213, 214, 215, 216, 217, 218, 219, 220, 221, 222, 223, 224, 225, 226, 227, 228, 229, 230, 231, 232, 233, 234, 235, 236, 237, 238, 239, 240, 241, 242, 243, 244, 245, 246, 247, 248, 249, 250, 251. 252, 253, 254, 255, 256, 257, 258, 259, 260, 261, 262, 263, 264, 265, 266, 267, 268, 269, 270, 271, 272, 273, 274, 275, 276, 277, 278, 279, 280, 281, 282, 283, 284, 285, 286, 287, 288, 289, 290, 291, 292, 293, 294, 295, 296, 297, 298, 299, 300, 301, 302, 303, 304, 305, 306, 307, 308, 309, 310, 311, 312, 313, 314, 315, 316, 317, 318, 319, 320, 321, 322, 323, 324, 325, 326, 327, 328, 329, 330, 331, 332, 333, 334, 335, 336, 337, 338, 339, 340, 341, 342, 343, 344, 345. 346, 347, 348, 349, 350, 351, 352, 353, 354, 355, 356, 357, 358, 359, 360, 361, 362, 363. 364, 365, 366, 367, 368, 369, 370, 371, 372, 373, 374, 375, 376, 377, 378, 379, 380, 381, 382, 383, 384, 385, 386. 387, 388, 389, 390, 391, 392, 393, 394, 395, 396, 397, 398, 399, 400, 401, 402, 403, 404, 405, 406, 407, 408, 409, 410, 411, 412, 413, 414, 415, 416, 417, 418, 419, 420, 421, 422, 423, 424, 425, 426, 427, 428, 429, 430, 431, 432, 433, 434, 435, 436, 437, 438, 439, 440, 441, 442, 443, 444, 445, 446, 447, 448, 449, 450, 451, 452, 453, 454, 455, 456, 457, 458, 459, 460, 461, 462, 463, 464, 465, 466, 467, 468, 469, 470, 471, 472, 473, 474, 475, 476, 477, 478, 479, 480, 481, 482, 483, 484, 485, 486, 487, 488, 489, 490, 491, 492,493, 494, 495, 496, 497, 498, 499, 500, 501, 502, 503, 504, 505, 506, 507, 508, 509, 510, 511, 512, 513, 514, 515, 516, 517, 518, 519, 520, 521, 522, 523, 524, 525, 526, 527, 528, 529, 530, 531, 532, 533, 534, 535, 536, 537, 538, 539, 540, 541, 542, 543, 544, 545, 546, 547, 548, 549, 550, 551, 552, 553, 554, 555, 556, 557, 558, 559, 560, 561, 562, 563, 564, 565, 566, 567, 568, 569, 570, 571, 572, 573, 574, 575, 576, 577, 578, 579, 580, 581, 582, 583, 584, 585, 586, 587, 588, 589, 590, 591, 592, 593, 594, 595, 596, 597, 598, 599, and 600 nucleotides. The length of the promoter region for the viral genome may be 4-10, 10-20, 10-50, 20-30, 30-40, 40-50, 50-60, 50-100, 60-70, 70-80, 80-90, 90-100, 100-110, 100-150, 110-120, 120-130, 130-140, 140-150, 150-160, 150-200, 160-170, 170-180, 180-190, 190-200, 200-210, 200-250, 210-220, 220-230, 230-240, 240-250, 250-260, 250-300, 260-270, 270-280, 280-290, 290-300, 300-310, 300-350, 310-320, 320-330, 330-340, 340-350, 350-360, 350-400, 360-370, 370-380, 380-390, 390-400, 400-410, 400-450, 410-420, 420-430, 430-440, 440-450, 450-460, 450-500, 460-470, 470-480, 480-490, 490-500, 500-510, 500-550, 510-520, 520-530, 530-540, 540-550, 550-560, 550-600, 560-570, 570-580, 580-590, and 590-600 nucleotides. As a non-limiting example, the viral genome comprises a promoter region that is about 4 nucleotides in length. As a non-limiting example, the viral genome comprises a promoter region that is about 17 nucleotides in length. As a non-limiting example, the viral genome comprises a promoter region that is about 204 nucleotides in length. As a non-limiting example, the viral genome comprises a promoter region that is about 219 nucleotides in length. As a non-limiting example, the viral genome comprises a promoter region that is about 260 nucleotides in length. As a non-limiting example, the viral genome comprises a promoter region that is about 303 nucleotides in length. As a non-limiting example, the viral genome comprises a promoter region that is about 382 nucleotides in length. As a non-limiting example, the viral genome comprises a promoter region that is about 588 nucleotides in length.

[0064] In certain embodiments, the promoter may be a combination of two or more components of the same or different starting or parental promoters such as, but not limited to, CMV and CBA. Each component may have a length of 200-800 nucleotides (or any value or range therein), or more than 800 nucleotides. Each component may have a length between 200-300, 200-400, 200-500, 200-600, 200-700, 200-800, 300-400, 300-500, 300-600, 300-700, 300-800, 400-500, 400-600, 400-700, 400-800, 500-600, 500-700, 500-800, 600-700, 600-800 or 700-800. In certain embodiments, the promoter is a combination of a 382 nucleotide CMV-enhancer sequence and a 260 nucleotide CBA-promoter sequence.

[0065] In certain embodiments, the viral genome comprises a ubiquitous promoter. Non-limiting examples of ubiquitous promoters comprise CMV, CBA (comprising derivatives CAG, CBh, etc.), EF-1a, PGK, UBC, GUSB (hGBp), and UCOE (promoter of HNRPA2B1-CBX3), In certain embodiments, the promoter region is derived from a CBA promoter sequence. As a non-limiting example, the promoter is 260 nucleotides in length.

[0066] Yu et al. (Molecular Pain 2011, 7:63: the content of which is incorporated herein by reference in its entirety, insofar as it does not conflict with the present disclosure) evaluated the expression of eGFP under the CAG, EFIn, PGK and UBC promoters in rat DRG cells and primary DRG cells using lentiviral vectors and found that UBC showed weaker expression than the other 3 promoters and only 10-12% glial expression was seen for all promoters. Soderblom et al. (E. Neuro 2015; the contents of which are each incorporated herein by reference in its entirety) evaluated the expression of eGFP in AAV8 with CMV and UBC promoters and AAV2 with the CMV promoter after injection in the motor cortex. Intranasal administration of a plasmid containing a UBC or EFIa promoter showed a sustained airway expression greater than the expression with the CMV promoter (See e.g., Gill et al., Gene Therapy 2001, Vol. 8, 1539-1546; the content of which is incorporated herein by reference in its entirety, insofar as it does not conflict with the present disclosure) Husain et al. (Gene Therapy 2009; the content of which is incorporated herein by reference in its entirety, insofar as it does not conflict with the present disclosure) evaluated an HβH construct with a hGUSB promoter, a HSV-1LAT promoter and an NSE: promoter and found that the HβH construct showed weaker expression than NSE in mouse brain. Passini and Wolfe (J. Virol. 2001, 12382-12392, the content of which is incorporated herein by reference in its entirety, insofar as it does not conflict with the present disclosure) evaluated the long term effects of the HβH vector following an intraventricular injection in neonatal mice and found that there was sustained expression for at least 1 year. Low expression in all brain regions was found by Xu et al, (Gene Therapy 2001, 8, 1323-1332; the content of which is incorporated herein by reference in its entirety, insofar as it does not conflict with the present disclosure) when NFL and NFH promoters were used as compared to the CMV-lacZ, CMV-luc, EF, GFAP, hENK, nAChR, PPE, PPE+wpre, NSE (0.3 kb), NSE (1.8 kb) and NSE (1.8 kb+wpre). Xu et al. found that the promoter activity in descending order was NSE (1.8 kb), FT, NSF (0.3 kb), GFAP, CMV, hENK, PPE, NFL and NFH. ⁻NFL promoter is a 650-nucleotide promoter and NFH promoter is a 920-nucleotide promoter which are both absent in the liver but NFH promoter is abundant in the sensory proprioceptive neurons, brain and spinal cord and NFH promoter is present in the heart. SCNSA promoter is a 470 nucleotide promoter which expresses throughout the DRG, spinal cord and brain with particularly high expression seen in the hippocampal neurons and cerebellar Purkinje cells, cortex, thalamus and hypothalamus (See e.g., Drews et al. Identification of evolutionary conserved, functional noncoding elements in the promoter region of the sodium channel gene SCN8A, Manim Genome (2007) 18:723-731; and Raymond et al. Expression of Alternatively Spliced Sodium Channel a-subunit genes, Journal of Biological Chemistry (2004) 279(44) 46234-46241; the contents of each of which are incorporated herein by reference in their entireties, insofar as they do not conflict with the present disclosure).

[0067] Any of the promoters taught by the aforementioned Yu, Soderblom, Gill, Husain, Passini, Xu, Drews or Raymond may be used in the present disclosures.

[0068] In certain embodiments, the promoter is not cell specific.

[0069] In certain embodiments, the promoter is a ubiquitin e (HBC) promoter. The UBC promoter may have a size of 300-350 nucleotides. As a non-limiting example, the UBC promoter is 332 nucleotides. In certain embodiments, the promoter is a f3-glucuronidase (GUSB) promoter. The GUSB promoter may have a size of 350-400 nucleotides. As a non-limiting example, the GUSB promoter is 378 nucleotides. In certain embodiments, the promoter is a neurofilament light chain (NFL) promoter. The NFL promoter may have a size of 600-700 nucleotides. As a non-limiting example, the NFL promoter is 650 nucleotides. In certain embodiments, the promoter is a neurofilament heavy chain (NFH) promoter. The NFH promoter may have a size of 900-950 riticleotides. As a non-limiting example, the NFH promoter is 920 nucleotides. In certain embodiments, the promoter is a SCNSA promoter. The SCN8A promoter may have a size of 450-500 nucleotides. As a non-limiting example, the SCN8A promoter is 470 nucleotides.

[0070] In certain embodiments, the promoter is a frataxin (FXN) promoter. In certain embodiments, the promoter is a phosphoglycerate kinase 1 (PGK) promoter. In certain embodiments, the promoter is a chicken β-actin (CBA) promoter, or variant thereof. In certain embodiments, the promoter is a CB6 promoter. In certain embodiments, the promoter is a minimal CB promoter. In certain embodiments, the promoter is a cytomegalovirus (CMV) promoter. In certain embodiments, the promoter is a H1 promoter. In certain embodiments, the promoter is a CAG promoter. In certain embodiments, the promoter is a GFAP promoter. In certain embodiments, the promoter is a synapsin promoter. In certain embodiments, the promoter is an engineered promoter. In certain embodiments, the promoter is a liver or a skeletal muscle promoter. Non-limiting examples of liver promoters comprise human α-1-antitrypsin (hAAT) and thyroxine binding globulin (TBG). Non-limiting examples of skeletal muscle promoters comprise Desmin, MCK or synthetic C5-12. In certain embodiments, the promoter is an RNA pot III promoter. As a non-limiting example, the RNA pol III promoter is U6. As a non-limiting example, the RNA pol HI promoter is H1 . In certain embodiments, the promoter is a cardiomyocyte-specific promoter. Non-limiting examples of cardiomyocyte-specific promoters comprise aMHC, cTnT, and CMV-MLC2k. In certain embodiments, the viral genome comprises two promoters. As a non-limiting example, the promoters are an EF1α promoter and a CMV promoter.

[0071] In certain embodiments, the viral genome comprises an enhancer element, a promoter and/or a 5′ UTR intron. The enhancer element, also referred to herein as an “enhancer,” may be, but is not limited to, a CMV enhancer, the promoter may be, but is not limited to, a CMV, CBA, UBC, GUSB, NSE, Synapsin, MeCP2, and GFAP promoter and the 5′ UTR/intron may be, but is not limited to, SV40, and CBA-MVM, As a non-limiting example, the enhancer, promoter and/or intron used in combination may be: (1) CMV enhancer, CMV promoter, SV40 5′ UTR intron; (2) CMV enhancer, CBA promoter, SV-40 5′ UTR intron; (3) CMV enhancer, CBA promoter, CBA-MVM 5′ UTR intron; (4) UBC promoter; (5) GUSB promoter; (6) NSE promoter; (7) Synapsin promoter; (8) MeCP2 promoter and (9) GFAP promoter.

[0072] In certain embodiments, the viral genome comprises an engineered promoter.

[0073] In another embodiment, the viral genome comprises a promoter from a naturally expressed protein.

[0074] In certain embodiments, the AAV particles of the present disclosure comprise a viral genome with at least one enhancer region. The enhancer region(s) may, independently, have a length such as, but not limited to, 300, 301, 302, 303, 304, 305, 306, 307, 308, 309, 310, 311, 312, 313, 314, 315, 316, 317, 318, 319, 320, 321, 322, 323, 324, 325, 326, 327, 328, 329, 330, 331, 332, 333, 334, 335, 336, 337, 338, 339, 340, 341, 342, 343, 344, 345, 346, 347, 348, 349, 350, 351, 352, 353, 354, 355, 356, 357, 358, 359, 360, 361, 362, 363, 364, 365, 366, 367, 368, 369, 370, 371, 372, 373, 374, 375, 376, 377, 378, 379, 380, 381, 382, 383, 384, 385, 386, 387, 388, 389, 390, 391, 392, 393, 394, 395, 396, 397, 398, 399, and 400 nucleotides. The length of the enhancer region for the viral genome may be 300-310, 300-325, 305-315, 310-320, 315-325, 320-330, 325-335, 325-350, 330-340, 335-345, 340-350, 345-355, 350-360, 350-375, 355-365, 360-370, 365-375, 370-380, 375-385, 375-400, 380-390, 385-395, and 390-400 nucleotides, As a non-limiting example, the viral genome comprises an enhancer region that is about 303 nucleotides in length. As a non-limiting example, the viral genome comprises an enhancer region that is about 382 nucleotides in length.

[0075] In certain embodiments, the enhancer region is derived from a CMV enhancer sequence. As a non-limiting example, the CMV enhancer is 382 nucleotides in length.

### Untranslated Regions (UT)

[0076] By definition, wild type untranslated regions (UTRs) of a gene are transcribed but not translated. Generally, the 5′ UTR starts at the transcription start site and ends at the start codon and the 3′ UTR starts immediately following the stop codon and continues until the termination signal for transcription.

[0077] Features typically found in abundantly expressed genes of specific target organs may be engineered into UTRs to enhance the stability and protein production. As a non-limiting example, a 5′ UTR from mRNA normally expressed in the liver (e.g., albumin, serum amyloid A, Apolipoprotein A/B/E, transferrin, alpha fetoprotein, erythropoietin, or Factor VIII) may be used in the viral genomes of the AAV particles of the present disclosure to enhance expression in hepatic cell lines or liver.

[0078] While not wishing to be bound by theory, wild-type 5′ untranslated regions (UTRs) comprise features which play roles in translation initiation. Kozak sequences, which are commonly known to be involved in the process by which the ribosome initiates translation of many genes, are usually comprised in 5′ UTRs. Kozak sequences have the consensus CCR(A/G)CCAUGG, where R is a purine (adenine or guanine) three bases upstream of the start codon (ATG), which is followed by another ‘G’. In certain embodiments, the 5′ UTR in the viral genome comprises a Kozak sequence. In certain embodiments, the 5′ UTR in the viral genome does not comprise a Kozak sequence.

[0079] While not wishing to be bound by theory, wild-type 3′ UTRs are known to have stretches of Adenosines and Uridines embedded therein. These AU rich signatures are particularly prevalent in genes with high rates of turnover. Based on their sequence features and functional properties, the AU rich elements (AREs) can be separated into three classes (Chen et al, 1995, the content of which is incorporated herein by reference in its entirety as related to AU rich elements, insofar as it does not conflict with the present disclosure): Class I AREs, such as, but not limited to, c-Myc and MyoD, contain several dispersed copies of an AUUUA motif within U-rich regions. Class II AREs, such as, but not limited to, GM-CSF and TNF-α, possess two or more overlapping UUAUUUA(U/A)(U/A) nonamers. Class III ARES, such as, but not limited to, c-Jun and Myogenin, are less well defined. These U rich regions do not contain an AUUUA motif. Most proteins binding to the AREs are known to destabilize the messenger, whereas members of the ELAV family, most notably HuR, have been documented to increase the stability of mRNA. HuR binds to AREs of all the three classes. Engineering the HuR specific binding sites into the 3′ UTR of nucleic acid molecules will lead to HuR binding and thus, stabilization of the message in viva.

[0080] Introduction, removal or modification of 3′ UTR AU rich elements (AREs) can be used to modulate the stability of polynucleotides. When engineering specific polynucleotides, (e.g., payload regions of viral genomes), one or more copies of an ARE can be introduced to make polynucleotides less stable and thereby curtail translation and decrease production of the resultant protein. Likewise, AREs can be identified and removed or mutated to increase the intracellular stability and thus increase translation and production of the resultant protein.

[0081] In certain embodiments, the 3′ UTR of the viral genome may comprise an oligo(dT) sequence for templated addition of a poly-A tail.

[0082] In certain embodiments, the viral genome may comprise at least one miRNA seed, binding site or full sequence. MicroRNAs (or miRNA or miR) are 19-25 nucleotide noncoding RNAs that bind to the sites of nucleic acid targets and down-regulate gene expression either by reducing nucleic acid molecule stability or by inhibiting translation. A microRNA sequence comprises a “seed” region, i.e., a sequence in the region of positions 2-8 of the mature microRNA., which sequence has perfect Watson-Crick complementarity to the miRNA target sequence of the nucleic acid.

[0083] In certain embodiments, the viral genome may be engineered to comprise, alter or remove at least one miRNA binding site, sequence or seed region.

[0084] Any UTR from any gene known in the art may he incorporated into the viral genome of the AAV particle. These UTRs, or portions thereof, may be placed in the same orientation as in the gene from which they were selected, or they may be altered in orientation or location. In certain embodiments, the UTR used in the viral genome of the AAV particle may be inverted, shortened, lengthened, made with one or more other 5′ UTRs or 3′ UTRs known in the art. As used herein, the term “altered” as it relates to a UTR, means that the UTR has been changed in some way in relation to a reference sequence. For example, a 3′ or 5′ UTR may be altered relative to a wild type or native UTR by the change in orientation or location as taught above or may be altered by the inclusion of additional nucleotides, deletion of nucleotides, swapping or transposition of nucleotides.

[0085] In certain embodiments, the viral genome of the AAV particle comprises at least one artificial UTRs which is not a variant of a wild type UTR.

[0086] In certain embodiments, the viral genome of the AAV particle comprises UTRs which have been selected from a family of transcripts whose proteins share a common function, structure, feature or property.

### Polyadenylation Sequence

[0087] In certain embodiments, the viral genome of the AAV particles of the present disclosure comprise at least one polyadenylation sequence. The viral genome of the AAV particle may comprise a polyadenylation sequence between the 3′ end of the payload coding sequence and the 5′ end of the 3′ ITR.

[0088] In certain embodiments, the polyadenylation sequence or “polyA sequence” may range from absent to about 500 nucleotides in length. The polyadenylation sequence may be, but is not limited to, 1-500 nucleotides in length (or any value or range therein),

[0089] In certain embodiments, the polyadenylation sequence is 127 nucleotides in length. In certain embodiments, the polyadenylation sequences is 477 nucleotides in length. In certain embodiments, the polyadenylation sequence is 552 nucleotides in length.

### Linkers

[0090] Viral genomes of the present disclosure may be engineered with one or more spacer or linker regions to separate coding or non-coding regions.

[0091] In certain embodiments, the payload region of the AAV particle may optionally encode one or more linker sequences. In some cases, the linker may be a peptide linker that may be used to connect the polypeptides encoded by the payload region. Some peptide linkers may be cleaved after expression to separate polypeptide domains, allowing assembly of mature protein fragments. Linker cleavage may be enzymatic. In some cases, linkers comprise an enzymatic cleavage site to facilitate intracellular or extracellular cleavage. Some payload regions encode linkers that interrupt polypeptide synthesis during translation of the linker sequence from an mRNA transcript. Such linkers may facilitate the translation of separate protein domains (e.g., heavy and light chain antibody domains) from a single transcript. In some cases, two or more linkers are encoded by a payload region of the viral genome.

[0092] In certain embodiments, payload regions encode linkers comprising furin cleavage sites. Furin is a calcium dependent serine endoprotease that cleaves proteins just downstream of a basic amino acid target sequence (Arg-X-(Arglys)-Arg) (Thomas, G., 2002. Nature Reviews Molecular Cell Biology 3(10): 753-66; the content of which is incorporated herein by reference in its entirety as related to linker molecules or sequences, insofar as it does not conflict with the present disclosure). Furin is enriched in the trans-golgi network where it is involved in processing cellular precursor proteins. Furin also plays a role in activating a number of pathogens. This activity can be taken advantage of for expression of polypeptides of the disclosure.

[0093] In certain embodiments, payload regions encode linkers comprising 2A peptides. 2A peptides are small “self-cleaving” peptides (18-22 amino acids) derived from viruses such as foot-and-mouth disease virus (F2A), porcine teschovirus-1 (P2A), Thoseaasigna virus (T2A), or equine rhinitis A virus (E2A). The 2A designation refers specifically to a region of picomavims polyproteins that lead to a ribosomal skip at the glycyl-prolyl bond in the C-terminus of the 2A peptide (Kim, et al.. 2011. PLoS One 6(4): e18556; the content of which is incorporated herein by reference in its entirety as related to 2A peptide linkers, insofar as it does not conflict with the present disclosure). This skip results in a cleavage between the 2A peptide and its immediate downstream peptide. As opposed to IRES linkers, 2A peptides generate stoichiometric expression of proteins flanking the 2A peptide and their shorter length can be advantageous in generating viral expression vectors.

[0094] In certain embodiments, payload regions encode linkers comprising IRES. Internal ribosomal entry site (IRES) is a nucleotide sequence (>500 nucleotides) that allows for initiation of translation in the middle of an mRNA sequence (Kim, J. H. et al., 2011. PLoS One 6(4): e18556, the content of which is incorporated herein by reference in its entirety as related to IRES regions and linkers, insofar as it does not conflict with the present disclosure). Use of an IRES sequence ensures co-expression of genes before and after the IRES, though the sequence following the IRES may be transcribed and translated at lower levels than the sequence preceding the IRES sequence.

[0095] In certain embodiments, the payload region may encode one or more linkers comprising cathepsin, matrix metalloproteinases or legumain cleavage sites. Such linkers are described e.g. by Cizeau and Macdonald in International Publication No. WO2008052322, the content of which is incorporated herein by reference in its entirety as related to linker molecules and sequences, insofar as it does not conflict with the present disclosure. Cathepsins are a family of proteases with unique mechanisms to cleave specific proteins. Cathepsin B is a cysteine protease and cathepsin D is an aspartyl protease. Matrix metalloproteinases are a family of calcium-dependent and zinc-containing endopeptidases. Legumain is an enzyme catalyzing the hydrolysis of (-Asn-Xaa-) bonds of proteins and small molecule substrates.

[0096] In certain embodiments, payload regions may encode linkers that are not cleaved. Such linkers may comprise a simple amino acid sequence, such as a glycine rich sequence. In some cases, linkers may comprise flexible peptide linkers comprising glycine and serine residues. These flexible linkers are small and without side chains so they tend not to influence secondary protein structure while providing a flexible linker between antibody segments (George, R. A., et al., 2002, Protein Engineering 15(11): 871-9; Huston, J. S. et at, 1988. PNAS 85:5879-83; and Shan, D. et al., 1999. Journal of Immunology. 162(11):6589-95; the contents of which are each incorporated herein by reference in their entireties as related to linker molecules and sequences, insofar as they do not conflict with the present disclosure). Furthermore, the polarity of the serine residues improves solubility and prevents aggregation problems.

[0097] In certain embodiments, payload regions of the present disclosure may encode small and unbranched serine-rich peptide linkers, such as those described by Huston et al. in U.S. Pat. No. 5,525,491, the content of which is incorporated herein by reference in its entirety as related to linker molecules and sequences, insofar as it does not conflict with the present disclosure. Polypeptides encoded by the payload region of the present disclosure, linked by serine-rich linkers, have increased solubility.

[0098] In certain embodiments, payload regions of the present disclosure may encode artificial linkers, such as those described by Whitlow and Filpula in U.S. Pat. No. 5,856,456 and Ladner et al. in U.S. Pat. No. 4,946,778, the contents of which are each incorporated herein by reference in their entireties as related to linker molecules and sequences, insofar as they do not conflict with the present disclosure.

[0099] In certain embodiments, the linker region may be 1-50, 1-100, 50-100, 50-150, 100-150, 100-200, 150-200, 150-250, 200-250, 200-300, 250-300, 250-350, 300-350, 300-400, 350-400, 350-450, 400-450, 400-500, 450-500, 450-550, 500-550, 500-600_{;} 550-600, 550-650, or 600-650 nucleotides in length. The linker region may have a length of 1-650 nucleotides (or any value or range therein) r greater than 650. In certain embodiments, the linker region may he 12 nucleotides in length. In certain embodiments, the linker region may be 18 nucleotides in length. In certain embodiments, the linker region may be 45 nucleotides in length. In certain embodiments, the linker region may be 54 nucleotides in length. In certain embodiments, the linker region may be 66 nucleotides in length. In certain embodiments, the linker region may be 75 nucleotides in length. In certain embodiments, the linker region may be 78 nucleotides in length. In certain embodiments, the linker region may be 87 nucleotides in length. In certain embodiments, the linker region may be 108 nucleotides in length. In certain embodiments, the linker region may be 153 nucleotides in length. In certain embodiments, the linker region may be 198 nucleotides in length. In certain embodiments, the linker region may be 623 nucleotides in length.

### Introns and Evans

[0100] In certain embodiments, the vector genome comprises at least one element to enhance the transgene target specificity and expression (See e.g., Powell et al. Viral Expression Cassette Elements to Enhance Transgene Target Specificity and Expression in Gene Therapy, 2015; the content of which is incorporated herein by reference in its entirety as related to transgene targeting enhancers, insofar as it does not conflict with the present disclosure) such as an intron. Non-limiting examples of introns comprise, MVM (67-97 bps), F.IX truncated intron 1 (300 bps), β-globin SD/immunoglobulin heavy chain splice acceptor (250 bps), adenovirus splice donor/immunoglobin splice acceptor (500 bps), SV40 late splice donor/splice acceptor (1.9S/16S) (180 bps) and hybrid adenovirus splice donor/IgG splice acceptor (230 bps).

[0101] In certain embodiments, the intron or intron portion may be 100-500 nucleotides in length. The intron may have a length of 80, 90, 100, 110, 120, 130, 140, 150, 160, 170, 171, 172, 173, 174, 175, 176, 177, 178, 179, 180, 190, 200, 210, 220, 230, 240, 250, 260, 270, 280, 290, 300, 310, 320, 330, 340, 350, 360, 370, 380, 390, 400, 410, 420, 430, 440, 450, 460, 470, 480, 490 or 500. The intron may have a length between 80-100, 80-120, 80-140, 80-160, 80-180, 80-200, 80-250, 80-300, 80-350, 80-400, 80-450, 80-500, 200-300, 200-400, 200-500, 300-400, 300-500, or 400-500.

[0102] In certain embodiments, the intron region(s) may, independently, have a length such as, but not limited to, 25, 26, 27, 28, 29, 30, 31, 32, 33, 34, 35, 36, 37, 38, 39, 40, 41, 42, 43, 44, 45, 46, 47, 48, 49, 50, 51, 52, 53, 54, 55, 56, 57, 58, 59, 60, 61, 62, 63, 64, 65, 66, 67, 68, 69, 70, 71, 72, 73, 74, 75, 76, 77, 78, 79, 80, 81, 82, 83, 84, 85, 86, 87, 88, 89, 90, 91, 92, 93, 94, 95, 96, 97, 98, 99, 100, 101, 102, 103, 104, 105, 106, 107, 108, 109, 110, 111, 112, 113, 114, 115, 116, 117, 118, 119, 120, 121, 122, 123, 124, 125, 126, 127, 128, 129, 130, 131 132, 133. 134, 135. 136, 137, 138, 139, 140, 141, 142 143,144, 145, 146, 147, 148, 149, 150, 151, 152, 153, 154, 155, 156, 157, 158, 159, 160 161, 162, 163, 164, 165, 166, 167, 168, 169, 170, 171, 172, 173, 174, 175, 176, 177, 178, 179, 180, 181, 182, 183, 184, 185, 186, 187, 188. 189, 190, 191, 192, 193, 194, 195, 196, 197, 198, 199, 200, 201, 202, 203, 204, 205, 206, 207, 208, 209, 210, 211, 212, 213, 214, 215, 216, 217, 218, 219, 220, 221, 222, 223, 224, 225, 226, 227, 228, 229, 230, 231, 232, 233, 234, 235, 236, 237, 238, 239, 240, 241. 242, 243, 244, 245, 246, 247, 248, 249, 250, 251, 252, 253, 254, 255, 256, 257, 258, 259. 260, 261, 262, 263, 264, 265, 266, 267, 268. 269, 270, 271, 272, 273, 274, 275, 276, 277, 278, 279, 280, 281, 282, 283, 284, 285, 286, 287, 288, 289, 290, 291, 292, 293, 294, 295, 296, 297, 298, 299, 300, 301, 302, 303, 304, 305, 306, 307, 308, 309, 310, 311, 312, 313, 314, 315, 316, 317, 318, 319, 320, 321, 322, 323, 324, 325, 326, 327, 328, 329, 330, 331, 332, 333, 334, 335, 336, 337, 338, 339, 340, 341, 342, 343, 344, 345, 346, 347, 348, 349, and 350 nucleotides. The length of the intron region for the viral genome may be 25-35, 25-50, 35-45, 45-55, 50-75, 55-65, 65-75, 75-85, 75-100, 85-95, 95-105, 100-125, 105-115, 115-125, 125-135, 125-150, 135-145, 145-155, 150-175, 155-165, 165-175, 175-185, 175-200, 185-195, 195-205, 200-225, 205-215, 215-225, 225-235, 225-250, 235-245, 245-255, 250-275, 255-265, 265-275, 275-285, 275-300, 285-295, 295-305, 300-325, 305-315, 315-325, 325-335, 325-350, and 335-345 nucleotides. As a non-limiting example, the viral genome comprises an intron region that is about 32 nucleotides in length. As a non-limiting example, the viral genome comprises an intron region that is about 172 nucleotides in length. As a non-limiting example, the viral genome comprises an intron region that is about 201 nucleotides in length. As a non-limiting example, the viral genome comprises an intron region that is about 347 nucleotides in length.

[0103] In certain embodiments, the intron region is derived from a SV40 intron sequence. As a non-limiting example, the intron is 172 nucleotides in length.

[0104] In certain embodiments, the AAV particles of the present disclosure can comprise a viral genome with at least one exon region. The exon region(s) may, independently, have a length such as, but not limited to, 2, 3, 4, 5, 6, 7, 8, 9, 10, 11, 12, 13, 14, 15, 16, 17, 18, 19, 20, 21, 22, 23, 24, 25, 26, 27, 28, 29, 30, 31, 32, 33, 34, 35, 36, 37, 38, 39, 40, 41, 42, 43, 44, 45, 46, 47, 48, 49, 50, 51, 52, 53, 54, 55, 56, 57, 58, 59, 60, 61, 62, 63, 64, 65, 66, 67, 68, 69, 70, 71, 72, 73, 74, 75, 76, 77, 78, 79, 80, 81, 82, 83, 84, 85, 86, 87, 88, 89, 90, 91, 92, 93, 94, 95, 96, 97, 98, 99, 100, 101, 102, 103, 104, 105, 106, 107, 108, 109, 110, 111, 112, 113, 114, 115, 116, 117, 118, 119, 120 121, 122, 123 124, 125, 126, 127, 128, 129, 130, 131, 132, 133, 134, 135, 136, 137, 138, 139, 140, 141, 142, 143, 144, 145, 146, 147, 148, 149, and 150 nucleotides. The length of the exon region for the viral genome may be 2-10, 5-10, 5-15, 10-20, 10-30, 10-40, 15-20, 15-25, 20-30, 20-40, 20-50, 25-30, 25-35, 30-40, 30-50, 30-60, 35-40, 35-45, 40-50, 40-60, 40-70, 45-50, 45-55, 50-60, 50-70, 50-80, 55-60, 55-65, 60-70, 60-80, 60-90, 65-70, 65-75, 70-80, 70-90, 70-100, 75-80, 75-85, 80-90, 80-100, 80-110, 85-90, 85-95, 90-100, 90-110, 90-120, 95-100, 95-105, 100-110, 100-120, 100-130, 105-110, 105-115, 110-120, 110-130, 110-140, 115-120, 115-125, 120-130, 120-140, 120-150, 125-130, 125-135, 130-140, 130-150, 135-140, 135-145, 140-150, and 145-150 nucleotides. As a non-limiting example, the viral genome comprises an exon region that is about 53 nucleotides in length. As a non-limiting example, the viral aenome comprises an exon region that is about 134 nucleotides in length.

### Stuffer Sequences

[0105] In certain embodiments, the viral genome comprises at least one element to improve packaging efficiency and expression, such as a sniffer or filler sequence. Non-limiting examples of stutter sequences comprise albumin and/or alpha-1 antitrypsin. Any known viral, mammalian, or plant sequence may be manipulated for use as a stutter sequence.

[0106] In certain embodiments, the stutter or filler sequence may be from about 100-3500 nucleotides in length. The stiffer sequence may have a length of about 100, 200, 300, 400, 500, 600, 700, 800, 900, 1000, 1100, 1200, 1300, 1400, 1500, 1600, 1700, 1800, 1900, 2000, 2100, 2200, 2300, 2400, 2500, 2600, 2700, 2800, 2900 or 3000.

[0107] In certain embodiments, the stuffer/filler region(s) may, independently, have a length such as, but not limited to, 50, 51, 52, 53, 54, 55, 56, 57, 58, 59. 60, 61, 62, 63, 64, 65, 66, 67, 68, 69, 70, 71, 72, 73, 74, 75, 76, 77, 78, 79, 80, 81, 82, 83, 84, 85, 86, 87, 88, 89, 90, 91, 92, 93, 94, 95, 96, 97, 98, 99, 100, 101, 102, 103, 104, 105, 106, 107, 108, 109, 110, 111, 112, 113, 114, 115, 116, 117, 118, 119, 120, 121, 122. 123, 124, 125, 126, 127, 128, 129, 130, 131, 132, 133, 134, 135, 136, 137, 138, 139, 140, 141, 142, 143, 144, 145, 146, 147, 148, 149, 150, 151, 152, 153, 154, 155, 156, 157, 158, 159, 160, 161, 162, 163, 164, 165, 166, 167, 168, 169, 170, 171, 172, 173, 174, 175, 176, 177, 178, 179, 180, 181, 182, 183, 184, 185, 186, 187, 188, 189, 190, 191, 192, 193, 194, 195, 196, 197, 198, 199, 200, 201, 2.02, 203, 204, 205, 206, 207, 208, 209, 210, 211, 212, 213, 214, 215, 216, 217, 218, 219, 220, 221, 222, 223, 224, 225, 226, 227, 228, 229, 230, 231, 232, 233, 234, 235, 236, 237, 238, 239, 240, 241, 242, 243, 244, 245, 246, 247, 248. 249, 250, 251, 252, 253, 254, 255, 256, 257, 258. 259, 260, 261, 262, 263, 264, 265, 266, 267, 268, 269, 270, 271, 272, 273, 274, 275, 276, 277, 278, 279, 280, 281, 282, 283, 284, 285, 286, 287, 288, 289, 290, 291, 292, 293, 294, 295. 296, 297, 298, 299, 300, 301, 302, 303, 304, 305, 306, 307, 308, 309, 310, 311, 312, 313, 314, 315, 316, 317, 318, 319, 320. 321, 322, 323, 324, 325, 326, 327, 328, 329, 330, 331, 332, 333, 334, 335, 336, 337, 338, 339, 340, 341, 342, 343, 344, 345, 346, 347, 348, 349, 350, 351, 352. 353, 354, 355, 356, 357, 358, 359, 360, 361, 362, 363, 364, 365, 366, 367, 368, 369, 370, 371, 372, 373, 374, 375, 376, 377, 378, 379, 380, 381, 382, 383, 384, 385, 386, 387, 388, 389, 390, 391, 392, 393. 394, 395, 396, 397, 398 399, 400, 401, 402, 403, 404, 405, 406, 407, 408, 409, 410, 411, 412, 413, 414, 415, 416, 417, 418, 419, 420, 421, 422, 423, 424, 425, 426, 427, 428, 429, 430, 431, 432, 433, 434, 435, 436, 437, 438, 439, 440, 441, 442, 443, 444, 445, 446, 447, 448, 449, 450, 451, 452, 453, 454, 455, 456, 457, 458, 459, 460, 461, 462, 463, 464, 465, 466, 467, 468, 469, 470, 471, 472, 473, 474, 475, 476, 477, 478, 479, 480, 481, 482, 483, 484, 485, 486, 487, 488, 489, 490, 491, 492, 493, 494, 495, 496, 497, 498, 499, 500, 501, 502, 503, 504, 505, 506, 507, 508, 509, 510, 511, 512, 513, 514, 515, 516, 517, 518, 519 520, 521, 522, 523, 524, 525, 526, 527, 528, 529, 530, 531, 532, 533, 534, 535, 536, 537, 538, 539, 540, 541, 542, 543, 544, 545, 546, 547, 548, 549, 550, 551, 552, 553, 554, 555. 556, 557, 558, 559, 560, 561, 562, 563, 564, 565, 566, 567, 568, 569, 570, 571, 572. 573, 574, 575, 576, 577, 578, 579, 580, 581, 582, 583, 584, 585, 586, 587, 588, 589, 590, 591, 592, 593, 594, 595, 596, 597, 598, 599, 600, 601, 602, 603, 604, 605, 606, 607, 608, 609, 610, 611, 612, 613, 614, 615, 616, 617, 618. 619, 620, 621, 622, 623, 624, 625, 626, 627, 628, 629, 630, 631, 632, 633, 634, 635, 636 637, 638, 639, 640, 641, 642, 643, 644, 645, 646, 647, 648, 649, 650, 651, 652, 653, 654, 655, 656, 657, 658, 659, 660, 661, 662, 663, 664, 665, 666, 667, 668, 669, 670, 671, 672, 673, 674, 675, 676, 677, 678, 679, 680, 681, 682, 683, 684, 685, 686, 687, 688, 689, 690, 691, 692, 693, 694, 695, 696, 697, 698. 699, 700, 701, 702, 703, 704, 705, 706, 707, 708, 709, 710, 711. 712, 713, 714, 715, 716. 717, 718. 719, 720, 721, 722, 723, 724, 725, 726, 727, 728, 729, 730. 731, 732, 733, 734, 735, 736, 737, 738, 739, 740, 741, 742, 743, 744, 745, 746, 747, 748, 749, 750, 751, 752, 753, 754, 755, 756, 757, 758, 759, 760, 761, 762, 763, 764, 765, 766, 767, 768, 769, 770, 771, 772, 773, 774, 775, 776, 777, 778, 779, 780, 781, 782, 783, 784, 785, 786, 787, 788, 789, 790, 791, 792, 793, 794, 795, 796 797, 798, 799, 800, 801, 802, 803, 804, 805, 806, 807, 808, 809, 810, 811, 812, 813, 814, 815, 816, 817, 818, 819, 820, 821, 822, 823, 824. 825, 826, 827, 828, 829, 830, 831, 832, 833, 834, 835. 836, 837, 838, 839, 840, 841, 842, 843, 844, 845, 846, 847, 848, 849, 850, 851, 852, 853, 854, 855, 856, 857, 858, 859, 860, 861, 862, 863 864, 865, 866, 867, 868, 869, 870, 871, 872, 873, 874, 875, 876, 877, 878, 879, 880, 881, 882, 883, 884, 885, 886, 887, 888, 889, 890, 891, 892, 893, 894, 895, 896, 897, 898, 899, 900, 901, 902, 903, 904, 905, 906, 907, 908, 909, 910, 911, 912, 913, 914, 915, 916, 917, 918, 919, 920, 921, 922, 923, 924, 925, 926, 927, 928, 929, 930, 931, 932, 933, 934, 935, 936, 937, 938, 939, 940, 941, 942, 943, 944, 945, 946, 947, 948, 949, 950, 951, 952, 953, 954, 955, 956, 957, 958, 959, 960, 961, 962, 963, 964, 965, 966, 967, 968, 969, 970, 971, 972, 973, 974, 975, 976, 977, 978, 979, 980, 981, 982, 983, 984, 985, 986, 987, 988, 989, 990, 991, 992, 993, 994, 995, 996, 997, 998, 999, 1000, 1001, 1002, 1003, 1004, 1005, 1006, 1007, 1008, 1009, 1010, 1011, 1012, 1013, 1014, 1015, 1016, 1017, 1018, 1019, 1020, 1021, 1022, 1023, 1024, 1025, 1026, 1027, 1028, 1029, 1030, 1031, 1032, 1033, 1034, 1035, 1036, 1037, 1038, 1039, 1040, 1041, 1042, 1043, 1044, 1045, 1046, 1047, 1048, 1049, 1050, 1051, 1052, 1053, 1054, 1055, 1056, 1057, 1058, 1059, 1060, 1061, 1062, 1063, 1064, 1065, 1066, 1067, 1068, 1069, 1070, 1071, 1072, 1073, 1074, 1075, 1076, 1077, 1078, 1079, 1080, 1081, 1082, 1083, 1084, 1085, 1086, 1087, 1088, 1089, 1090, 1091, 1092, 1093, 1094, 1095, 1096, 1097, 1098, 1099, 1100, 1101, 1102, 1103, 1104, 1105, 1106, 1107, 1108, 1109, 1110, 1111, 1112, 1113, 1114, 1115, 1116, 1117, 1118, 1119, 1120,1121, 1122, 1123, 1124, 1125, 1126, 1127, 1128, 1129, 1130, 1131, 1132., 1133, 1134, 1135, 1136, 1137, 1138, 1139, 1140, 1141, 1142, 1143, 1144, 1145,1146, 1147, 1148, 1149, 1150, 1151, 1152, 1153, 1154, 1155, 1156, 1157, 1158, 1159, 1160, 1161, 1162, 1163, 1164, 1165, 1166, 1167, 1168, 1169, 1170,1171, 1172, 1173, 1174, 1175, 1176, 1177, 1178, 1179, 1180, 1181, 1182, 1183, 1184, 1185, 1186, 1187, 1188, 1189, 1190, 1191, 1192, 1193, 1194, 1195, 1196, 1197, 1198, 1199, 1200. 1201, 1202, 1203, 1204, 1205, 1206, 1207, 1208, 1209, 1210, 1211, 1212, 1213, 1214, 1215, 1216, 1217, 1218, 1219, 1220, 1221, 1222, 1223, 1224, 1225, 1226, 1227, 1228, 1229, 1230, 1231, 1232, 1233, 1234, 1235, 1236, 1237, 1238, 1239, 1240. 1241, 1242, 1243, 1244, 1245, 1246, 1247, 1248, 1249, 1250, 1251, 1252, 1253, 1254, 1255, 1256, 1257, 1258, 1259, 1260, 1261, 1262, 1263, 1264, 1265, 1266, 1267, 1268, 1269, 1270, 1271, 1272, 1273, 1274, 1275, 1276, 1277, 1278, 1279, 1280. 1281, 1282, 1283, 1284, 1285, 1286, 1287, 1288, 1289, 1290. 1291, 1292, 1293, 1294, 1295, 1296, 1297, 1298, 1299, 1300, 1301, 1302, 1303, 1304, 1305, 1306, 1307, 1308, 1309, 1310, 1311, 1312, 1313, 1314, 1315, 1316, 1317, 1318, 1319, 1320, 1321, 1322, 1323, 1324, 1325, 1326, 1327, 1328, 1329, 1330, 1331, 1332, 1333, 1334, 1335, 1336, 1337, 1338, 1339, 1340, 1341, 1342, 1343, 1344, 1345, 1346, 1347, 1348, 1349, 1350, 1351, 1352, 1353, 1354, 1355, 1356, 1357, 1358, 1359, 1360, 1361, 1362, 1363, 1364, 1365, 1366, 1367, 1368, 1369, 1370, 1371, 1372, 1373, 1374, 1375, 1376, 1377, 1378, 1379, 1380 1381, 1382, 1383, 1384, 1385, 1386, 1387, 1388, 1389, 1390, 1391, 1392, 1393, 1394, 1395, 1396, 1397, 1398, 1399, 1400, 1401, 1402, 1403, 1404, 1405, 1406, 1407, 1408, 1409, 1410, 1411, 1412, 1413, 1414, 1415, 1416, 1417, 1418, 1419, 1420. 1421, 1422, 1423, 1424, 1425, 1426, 1427, 1428, 1429, 1430, 1431, 1432, 1433, 1434, 1435, 1436, 1437, 1438, 1439, 1440, 1441, 1442, 1443, 1444, 1445, 1446, 1447, 1448, 1449, 1450, 1451, 1452, 1453, 1454, 1455, 1456, 1457, 1458, 1459, 1460, 1461, 1462, 1463, 1464, 1465, 1466, 1467, 1468, 1469, 1470, 1471, 1472, 1473, 1474, 1475, 1476, 1477, 1478, 1479, 1480, 1481, 1482, 1483, 1484, 1485, 1486, 1487, 1488, 1489, 1490, 1491, 1492, 1493, 1494, 1495, 1496, 1497, 1498, 1499, 1500, 1501, 1502, 1503, 1504, 1505, 1506, 1507, 1508, 1509, 1510, 1511, 1512, 1513, 1514, 1515, 1516, 1517, 1518, 1519, 1520, 1521, 1522, 1523, 1524, 1525, 1526, 1527, 1528, 1529, 1530, 1531, 1532, 1533, 1534, 1535, 1536, 1537, 1538, 1539, 1540, 1541, 1542, 1543, 1544, 1545, 1546, 1547, 1548, 1549, 1550, 1551, 1552, 1553, 1554, 1555, 1556, 1557, 1558, 1559, 1560, 1561, 1562, 1563, 1564, 1565, 1566, 1567, 1568, 1569, 1570, 1571, 1572, 1573, 1574, 1575. 1576, 1577, 1578, 1579, 1580. 1581, 1582, 1583, 1584, 1585, 1586, 1587, 1588, 1589, 1590, 1591, 1592, 1593, 1594, 1595, 1596, 1597, 1598, 1599, 1600, 1601, 1602, 1603, 1604, 1605, 1606, 1607, 1608, 1609, 1610, 1611, 1612, 1613, 1614, 1615, 1616, 1617, 1618, 1619, 1620, 1621, 1622, 1623, 1624, 1625, 1626, 1627, 1628, 1629, 1630, 1631, 1632, 1633, 1634, 1635, 1636, 1637, 1638, 1639, 1640, 1641, 1642, 1643, 1644, 1645, 1646, 1647, 1648, 1649, 1650, 1651, 1652, 1653, 1654, 1655, 1656, 1657, 1658, 1659, 1660, 1661, 1662, 1663, 1664, 1665, 1666, 1667, 1668, 1669, 1670, 1671, 1672, 1673, 1674, 1675, 1676, 1677, 1678, 1679, 1680, 1681, 1682, 1683, 1684, 1685, 1686, 1687, 1688, 1689, 1690, 1691, 1692, 1693, 1694, 1695, 1696, 1697, 1698, 1699, 1700, 1701, 1702, 1703, 1704, 1705, 1706, 1707, 1708, 1709, 1710, 1711, 1712, 1713, 1714, 1715, 1716, 1717, 1718, 1719, 1720, 1721, 1722, 1723, 1724, 1725, 1726, 1727, 1728, 1729, 1730, 1731, 1732, 1733, 1734, 1735, 1736, 1737, 1738, 1739, 1740, 1741, 1742, 1743, 1744, 1745, 1746, 1747, 1748, 1749, 1750, 1751, 1752, 1753, 1754, 1755, 1756, 1757, 1758, 1759, 1760, 1761, 1762, 1763, 1764, 1765, 1766, 1767, 1768, 1769, 1770, 1771, 1772, 1773, 1774, 1775, 1776, 1777, 1778, 1779, 1780, 1781, 1782, 1783, 1784, 1785. 1786, 1787, 1788, 1789, 1790, 1791, 1792, 1793, 1794, 1795, 1796, 1797, 1798, 1799, 1800. 1801, 1802, 1803, 1804, 1805, 1806, 1807, 1808, 1809, 1810,1811, 1812, 1813, 1814, 1815, 1816, 1817, 1818, 1819, 1820, 1821, 1822, 1823, 1824, 1825, 1826, 1827, 1828, 1829, 1830, 1831, 1832, 1833, 1834, 1835, 1836, 1837, 1838, 1839, 1840. 1841, 1842, 1843, 1844, 1845, 1846, 1847, 1848, 1849, 1850, 1851, 1852, 1853, 1854, 1855, 1856, 1857, 1858, 1859, 1860, 1861, 1862, 1863, 1864, 1865, 1866, 1867, 1868, 1869, 1870, 1871, 1872, 1873, 1874, 1875, 1876, 1877, 1878, 1879, 1880, 1881, 1882, 1883, 1884, 1885, 1886, 1887, 1888, 1889, 1890, 1891, 1892, 1893, 1894, 1895, 1896, 1897, 1898, 1899, 1900, 1901, 1902, 1903, 1904, 1905, 1906, 1907, 1908, 1909, 1910, 1911, 1912, 1913, 1914, 1915, 1916, 1917, 1918, 1919, 1920, 1921, 1922, 1923, 1924, 1925, 1926, 1927, 1928, 1929, 1930, 1931, 1932, 1933, 1934, 1935, 1936, 1937, 1938, 1939, 1940, 1941, 1942, 1943, 1944, 1945, 1946, 1947, 1948, 1949, 1950, 1951, 1952, 1953, 1954, 1955, 1956, 1957, 1958, 1959, 1960, 1961, 1962, 1963, 1964, 1965, 1966, 1967, 1968, 1969, 1970, 1971, 1972, 1973, 1974, 1975, 1976, 1977, 1978, 1979, 1980. 1981, 1982, 1983, 1984, 1985, 1986, 1987, 1988, 1989, 1990, 1991, 1992, 1993, 1994, 1995, 1996, 1997, 1998, 1999, 2000, 2001, 2002, 2003, 2004, 2005, 2006, 2007 2008, 2009, 2010, 2011, 2012, 2013, 2014, 2015, 2016, 2017, 2018, 2019, 2020. 2021, 2022, 2023, 2024, 2025, 2026, 2027, 2028, 2029, 2030, 2031, 2032, 2033, 2034, 2035, 2036, 2037, 2038, 2039, 2040, 2041, 2042, 2043, 2044, 2045, 2046, 2047, 2048, 2049, 2050, 2051, 2052, 2053, 2054, 2055, 2056, 2057, 2058, 2059, 2060, 2061, 2062, 2063, 2064, 2065, 2066, 2067, 2068, 2069, 2070, 2071, 2012, 2073, 2074, 2075, 2076, 2077, 2078, 2079, 2080, 2081, 2082, 2083, 2084, 2085, 2086, 2087, 2088, 2089, 2090, 2091, 2092, 2093, 2094, 2095, 2096, 2097, 2098, 2099, 2100, 2101, 2102, 2103, 2104, 2105, 2106, 2107, 2108, 2109, 2110, 2111, 2112, 2113, 2114, 2115, 2116, 2117, 2118, 2119, 2120, 2121, 2122, 2123, 2124, 2125, 2126, 2127, 2128, 2129, 2130, 2131, 2132, 2133, 2134, 2135, 2136, 2137, 2138, 2139, 2140, 2141, 2142, 2143, 2144, 2145, 2146, 2147, 2148, 2149, 2150, 2151, 2152, 2153, 2154, 2155, 2156, 2157, 2158, 2159, 2160, 2161, 2162, 2163, 2164, 2165, 2166, 2167, 2168, 2169, 2170, 2171, 2172, 2173, 2174, 2175, 2176, 2177, 2178, 2179, 2180, 2181, 2182, 2183, 2184, 2185, 2186, 2187, 2188, 2189, 2190, 2191, 2192, 2193, 2194, 2195, 2196, 2197, 2198, 2199, 2200, 2201, 2202, 2203, 2204, 2205, 2206, 2207, 2208, 2209, 2210, 2211, 2212, 2213, 2214, 2215, 2216, 2217, 2218, 2219, 2220, 2221, 2222, 2223, 2224, 2225, 2226, 2227, 2228, 2229, 2230, 2231, 2232, 2233, 2234, 2235, 2236, 2237, 2238, 2239, 2240, 2241, 2242, 2243, 2244, 2245, 2246, 2247, 2248, 2249, 2250, 2251, 2252, 2253, 2254, 2255, 2256, 2257, 2258, 2259, 2260, 2261, 2262, 2263, 2264, 2265, 2266, 2267, 2268, 2269, 2270, 2271, 2272, 2273, 2274, 2275, 2276, 2277, 2278, 2279, 2280, 2281, 2282, 2283, 2284, 2285, 2286, 2287, 2288, 2289, 2290, 2291, 2292, 2293, 2294, 2295, 2296, 2297, 2298, 2299, 2300, 2301, 2302, 2303, 2304, 2305, 2306, 2307, 2308, 2309, 2310, 2311, 2312, 2313, 2314, 2315, 2316, 2317, 2318, 2319, 2320, 2321, 2322, 2323, 2324, 2325, 2326, 2327, 2328, 2329, 2330, 2331, 2332, 2333, 2334, 2335, 2336, 2337, 2338, 2339, 2340, 2341, 2342, 2343, 2344 2345, 2346, 2347, 2348, 2349, 2350, 2351, 2352, 2353, 2354, 2355, 2356, 2357, 2358, 2359, 2360, 2361, 2362, 2363, 2364, 2365, 2366, 2367, 2368, 2369, 2370, 2371, 2372, 2373, 2374, 2375, 2376, 2377, 2378, 2379, 2380, 2381, 2382, 2383, 2384, 2385, 2386, 2387, 2388, 2389, 2390, 2391, 2392, 2393, 2394, 2395, 2396, 2397, 2398, 2399, 2400, 2401, 2402, 2403, 2404, 2405, 2406, 2407, 2408, 2409, 2410, 2411, 2412, 2413, 2414, 2415, 2416, 2417, 2418, 2419, 2420, 2421, 2422, 2423, 2424, 2425, 2426, 2427, 2428, 2429, 2430, 2431, 2432, 2433, 2434, 2435, 2436, 2437, 2438, 2439, 2440, 2441, 2442, 2443, 2444, 2445, 2446, 2447, 2448, 2449, 2450, 2451, 2452, 2453, 2454, 2455, 2456, 2457, 2458, 2459, 2460, 2461, 2462, 2463, 2464, 2465, 2466, 2467, 2468, 2469, 2470, 2471, 2472, 2473, 2474, 2475, 2476, 2477, 2478, 2479, 2480, 2481, 2482, 2483, 2484, 2485, 2486, 2487, 2488, 2489, 2490, 2491, 2492, 2493, 2494, 2495, 2496, 2497, 2498, 2499, 2500, 2501, 2502, 2503, 2504, 2505, 2506, 2507, 2508, 2509, 2510, 2511, 2512, 2513, 2514, 2515, 2516, 2517, 2518, 2519, 2520, 2521, 2522, 2523, 2524, 2525, 2526, 2527, 2528, 2529, 2530, 2531, 2532, 2533, 2534, 2535, 2536, 2537, 2538, 2539, 2540, 2541, 2542, 2543, 2544, 2545, 2546, 2547, 2548, 2549, 2550, 2551, 2552, 2553, 2554, 2555, 2556, 2557, 2558, 2559, 2560, 2561, 2562, 2563, 2564, 2565, 2566, 2567, 2568, 2569, 2570, 2571, 2572, 2573, 2574, 2575, 2576, 2577, 2578, 2579, 2580, 2581, 2582, 2583, 2584, 2585, 2586, 2587, 2588, 2589, 2590, 2591, 2592, 2593, 2594, 2595, 2596, 2597, 2598, 2599, 2600, 2601, 2602, 2603, 2604, 2605, 2606, 2607, 2608, 2609, 2610, 2611, 2612, 2613, 2614, 2615, 2616, 2617, 2618, 2619, 2620, 2621, 2622, 2623, 2624, 2625, 2626, 2627, 2628, 2629, 2630, 2631, 2632, 2633, 2634, 2635, 2636, 2637, 2638, 2639, 2640, 2641, 2642, 2643, 2644, 2645, 2646, 2647, 2648, 2649, 2650, 2651, 2652, 2653, 2654, 2655, 2656, 2657, 2658, 2659, 2660, 2661, 2662, 2663, 2664, 2665, 2666, 2667, 2668, 2669, 2670, 2671, 2672, 2673, 2674, 2675, 2676, 2677, 2678, 2679, 2680, 2681, 2682, 2683, 2684, 2685, 2686, 2687, 2688, 2689, 2690, 2691, 2692, 2693, 2694, 2695, 2696, 2697, 2698, 2699, 2700, 2701, 2702, 2703, 2704, 2705, 2706, 2707, 2708, 2709, 2710, 2711, 2712, 2713, 2714, 2715, 2716, 2717, 2718, 2719, 2720, 2721, 2722, 2723, 2724, 2725, 2726, 2727, 2728, 2729, 2730, 2731, 2732, 2733, 2734, 2735, 2736, 2737, 2738, 2739, 2740, 2741, 2742, 2743, 2744, 2745, 2746, 2747, 2748, 2749, 2750, 2751, 2752, 2753, 2754, 2755, 2756, 2757, 2758, 2759, 2760, 2761, 2762, 2763, 2764, 2765, 2766, 2767, 2768, 2769, 2770, 2771, 2772, 2773, 2774, 2775, 2776, 2777, 2778, 2779, 2780, 2781, 2782, 2783, 2784, 2785, 2786, 2787, 2788, 2789, 2790, 2791, 2792, 2793, 2794, 2795, 2796, 2797, 2798, 2799, 2800, 2801, 2802, 2803, 2804, 2805, 2806, 2807, 2808, 2809, 2810, 2811, 2812, 2813, 2814, 2815, 2816, 2817, 2818, 2819, 2820, 2821, 2822, 2823, 2824, 2825, 2826, 2827, 2828, 2829, 2830. 2831, 2832, 2833, 2834, 2835, 2836, 2837, 2838, 2839, 2840, 2841, 2842, 2843, 2844, 2845, 2846, 2847, 2848, 2849, 2850, 2851, 2852, 2853, 2854, 2855, 2856, 2857, 2858, 2859, 2860, 2861, 2862, 2863, 2864, 2865, 2866, 2867, 2868, 2869, 2870, 2871, 2872, 2873, 2874, 2875, 2876, 2877, 2878, 2879, 2880, 2881, 2882, 2883, 2884, 2885, 2886, 2887, 2888, 2889, 2890, 2891, 2892, 2893, 2894, 2895, 2896, 2897, 2898, 2899, 2900, 2901, 2902, 2903, 2904, 2905, 2906, 2907, 2908, 2909, 2910, 2911, 2912, 2913, 2914, 2915, 2916, 2917, 2918, 2919, 2920, 2921, 2922, 2923, 2924, 2925, 2926, 2927, 2928, 2929, 2930, 2931, 2932, 2933, 2934, 2935, 2936, 2937, 2938, 2939, 2940, 2941, 2942, 2943, 2944, 2945, 2946, 2947, 2948, 2949, 2950, 2951, 2952, 2953, 2954, 2955. 2956, 2957, 2958, 2959, 2960, 2961, 2962, 2963, 2964, 2965, 2966, 2967, 2968, 2969, 2970. 2971, 2972, 2973, 2974, 2975, 2976, 2977, 2978, 2979, 2980, 2981, 2982, 2983, 2984, 2985, 2986, 2987, 2988, 2989, 2990, 2991, 2992, 2993, 2994, 2995, 2996, 2997, 2998, 2999, 3000, 3001, 3002, 3003, 3004, 3005, 3006, 3007, 3008, 3009, 3010. 3011, 3012, 3013, 3014, 3015, 3016, 3017, 3018, 3019, 3020, 3021, 3022, 3023, 3024, 3025, 3026, 3027, 3028, 3029, 3030, 3031, 3032, 3033, 3034, 3035, 3036, 3037, 3038, 3039, 3040, 3041, 3042, 3043, 3044, 3045, 3046, 3047, 3048, 3049, 3050, 3051, 3052, 3053, 3054, 3055, 3056, 3057, 3058, 3059, 3060, 3061, 3062, 3063, 3064, 3065, 3066, 3067, 3068, 3069, 3070, 3071, 3072, 3073, 3074, 3075, 3076, 3077, 3078, 3079, 3080, 3081, 3082, 3083, 3084, 3085, 3086, 3087, 3088, 3089, 3090, 3091, 3092, 3093, 3094, 3095, 3096, 3097, 3098, 3099, 3100, 3101, 3102, 3103, 3104, 3105, 3106, 3107, 3108, 3109, 3110, 3111, 3112, 3113, 3114, 3115, 3116, 3117, 3118, 3119, 3120, 3121, 3122, 3123, 3124, 3125, 3126, 3127, 3128, 3129, 3130, 3131, 3132, 3133, 3134, 3135, 3136, 3137, 3138, 3139, 3140, 3141, 3142, 3143, 3144, 3145, 3146, 3147, 3148, 3149, 3150, 3151, 3152, 3153, 3154, 3155, 3156, 3157, 3158, 3159, 3160, 3161, 3162, 3163, 3164, 3165, 3166, 3167, 3168, 3169, 3170, 3171, 3172, 3173, 3174, 3175, 3176, 3177, 3178, 3179, 3180, 3181, 3182, 3183, 3184, 3185, 3186, 3187, 3188, 3189, 3190, 3191, 3192, 3193, 3194, 3195, 3196, 3197, 3198, 3199, 3200, 3201, 3202, 3203, 3204, 3205, 3206, 3207, 3208, 3209, 3210, 3211, 3212, 3213, 3214, 3215, 3216, 3217, 3218, 3219, 3220, 3221, 3222, 3223, 3224, 3225, 3226, 3227, 3228, 3229, 3230, 3231, 3232, 3233, 3234, 3235, 3236, 3237, 3238, 3239, 3240, 3241, 3242, 3243, 3244, 3245, 3246, 3247, 3248, 3249, and 3250 nucleotides. The length of any filler region for the viral genome may be 50-100, 100-150, 150-200, 200-250, 250-300, 300-350, 350-400, 400-450, 450-500, 500-550, 550-600, 600-650, 650-700, 700-750, 750-800, 800-850, 850-900, 900-950, 950-1000, 1000-1050, 1050-1100, 1100-1150, 1150-1200, 1200-1250, 1250-1300, 1300-1350, 1350-1400, 1400-1450, 1450-1500, 1500-1550, 1550-1600, 1600-1650, 1650-1700, 1700-1750, 1750-1800, 1800-1850, 1850-1900, 1900-1950, 1950-2000, 2000-2050, 2050-2100, 2100-2150, 2150-2200, 2200-2250, 2250-2300, 2300-2350, 2350-2400, 2400-2450, 2450-2500, 2500-2550, 2550 2600, 2600-2650, 2650-2700, 2700-2750, 2750-2800, 2800-2850, 2850-2900, 2900-2950, 2950-3000, 3000-3050, 3050-3100, 3100-3150, 3150-3200, and 3200-3250 nucleotides. As a non-limiting example, the viral genome comprises a filler region that is about 55 nucleotides in length. As a non-limiting example, the viral genome comprises a filler region that is about 56 nucleotides in length. As a non-limiting example, the viral genome comprises a filler region that is about 97 nucleotides in length. As a non-limiting example, the viral genome comprises a filler region that is about 103 nucleotides in length. As a non-limiting example, the viral genome comprises a filler region that is about 105 nucleotides in length. As a non-limiting example, the viral genome comprises a filler region that is about 357 nucleotides in length. As a non-limiting example, the viral genome comprises a filler region that is about 363 nucleotides in length. As a non-limiting example, the viral genome comprises a filler region that is about 712 nucleotides in length. As a non-limiting example, the viral genome comprises a filler region that is about 714 nucleotides in length. As a non-limiting example, the viral genome comprises a filler region that is about 1203 nucleotides in length. As a non-limiting example, the viral genome comprises a filler region that is about 1209 nucleotides in length. As a non-limiting example, the viral genome comprises a filler region that is about 1512 nucleotides in length. As a non-limiting example, the viral genome comprises a filler region that is about 1519 nucleotides in length. As a non-limiting example, the viral genome comprises a filler region that is about 2395 nucleotides in length. As a non-limiting example, the viral genome comprises a filler region that is about 2403 nucleotides in length. As a non-limiting example, the viral genome comprises a filler region that is about 2405 nucleotides in length. As a non-limiting example, the viral genome comprises a filler region that is about 3013 nucleotides in length. As a non-limiting example, the viral genome comprises a filler region that is about 3021 nucleotides in length.

[0108] In certain embodiments, the filler region is 714 nucleotides in length.

### Multiple Cloning Site (MCS) Region

[0109] In certain embodiments, the AA particles of the present disclosure comprise a viral genome with at least one multiple cloning site (MCS) region. The MCS region(s) may, independently, have a length such as, but not limited to, 2, 3, 4, 5, 6, 7, 8, 9, 10, 11, 12, 13, 14, 15, 16, 17, 18, 19, 20, 21, 22, 23, 24, 25, 26, 27, 28, 29, 30, 31, 32, 33, 34, 35, 36, 37, 38, 39, 40, 41, 42, 43, 44, 45, 46, 47, 48, 49, 50, 51, 52, 53, 54, 55, 56, 57, 58, 59, 60, 61, 62, 63, 64, 65, 66, 67, 68, 69, 70, 71, 72, 73, 74, 75, 76, 77, 78, 79, 80, 81, 82, 83, 84, 85, 86, 87, 88, 89, 90, 91, 92, 93, 94, 95, 96, 97, 98, 99, 100, 101, 102, 103, 104, 105, 106, 107, 108, 109, 110, 111, 112, 113, 114, 115, 116, 117, 118, 119, 120, 121 22, 123, 124, 125, 126, 127, 128, 129, 130, 131, 132, 133, 134, 135, 136, 137, 138, 139, 140, 141, 142, 143, 144, 145, 146, 147, 148, 149, and 150 nucleotides, The length of the MCS region for the viral genome may be 2-10, 5-10, 5-15, 10-20, 10-30, 10-40, 15-20, 15-25, 20-30, 20-40, 20-50, 25-30, 25-35, 30-40, 30-50, 30-60, 35-40, 35-45, 40-50, 40-60, 40-70, 45-50, 45-55, 50-60, 50-70, 50-80, 55-60, 55-65, 60-70, 60-80, 60-90, 65-70, 65-75, 70-80, 70-90, 70-100, 75-80, 75-85, 80-90, 80-100, 80-110, 85-90, 85-95, 90-100, 90-110, 90-120, 95-100, 95-105, 100-110, 100-120, 100-130, 105-110, 105-115, 110-120, 110-130, 110-140, 115-120, 115-125, 120-130, 120-140, 120-150, 125-130, 125-135, 130-140, 130-150, 135-140, 135-145, 140-150, and 145-150 nucleotides, As a non-limiting example, the viral genome comprises an MCS region that is about 5 nucleotides in length. As a non-limiting example, the viral genome comprises an MCS region that is about 10 nucleotides in length. As a non-limiting example, the viral genome comprises an MCS region that is about 14 nucleotides in length. As a non-limiting example, the viral genome comprises an MCS region that is about 18 nucleotides in length. As a non-limiting example, the viral genome comprises an MCS region that is about 73 nucleotides in length. As a non-limiting example, the viral genome comprises an MCS region that is about 121 nucleotides in length.

[0110] In certain embodiments, the MCS region is 5 nucleotides in length.

[0111] In certain embodiments, the MCS region is 10 nucleotides in length.

### Genome Size

[0112] In certain embodiments, the AAV particle which comprises a payload described herein may be single stranded or double stranded vector genome. The size of the vector genome may be small, medium, large or the maximum size. Additionally, the vector genome may comprise a promoter and a polyA tail.

[0113] In certain embodiments, the vector genome which comprises a payload described herein may be a small single stranded vector genome. A small single stranded vector genome may be 2.1 to 3.5 kb in size such as about 2.1, 2.2, 2.3, 2.4, 2.5, 2.6, 2.7, 2.8, 2.9, 3.0, 3.1, 3.2, 3.3, 3.4, and 3.5 kb in size. As a non-limiting example, the small single stranded vector genome may be 3.2 kb in size. As another non-limiting example, the small single stranded vector genome may be 2.2 kb in size. Additionally, the vector genome may comprise a promoter and a polyA

[0114] In certain embodiments, the vector genome which comprises a payload described herein may be a small double stranded vector genome. A small double stranded vector genome may be 1.3 to 1.7 kb in size such as about 1.3, 1.4, 1.5, 1.6, and 1.7 kb in size. As a. non-limiting example, the small double stranded vector genome may be 1.6 kb in size. Additionally, the vector genome may comprise a promoter and a polyA tail.

[0115] In certain embodiments, the vector genome which comprises a payload described herein e.g., polynucleotide, siRNA or dsRNA, may be a medium single stranded vector genome. A medium single stranded vector genome may be 3.6 to 4.3 kb in size such as about 3.6, 3.7, 3.8, 3.9, 4.0, 4.1, 4.2 and 4.3 kb in size. As a non-limiting example, the medium single stranded vector genome may be 4.0 kb in size. Additionally, the vector genome may comprise a promoter and a polyA tail.

[0116] In certain embodiments, the vector genome which comprises a payload described herein may be a medium double stranded vector genome. A medium double stranded vector genome may be 1.8 to 2.1 kb in size such as about 1.8, 1.9, 2.0, and 2.1 kb in size. As a non-limiting example, the medium double stranded vector genome may he 2.0 kb in size. Additionally, the vector genome may comprise a promoter and a polyA tail.

[0117] In certain embodiments, the vector genome which comprises a payload described herein may be a large single stranded vector genome. A large single stranded vector genome may be 4.4 to 6.0 kb in size such as about 4.4, 4.5, 4.6, 4.7, 4.8, 4.9, 5.0, 5.1, 5.2, 5.3, 5.4, 5.5, 5.6, 5.7, 5.8, 5.9 and 6.0 kb in size. As a non-limiting example, the large single stranded vector genome may be 4.7 kb in size. As another non-limiting example, the large single stranded vector genome may be 4.8 kb in size. As yet another non-limiting example, the large single stranded vector genome may be 6.0 kb in size. Additionally, the vector genome may comprise a promoter and a polyA tail.

[0118] In certain embodiments, the vector genome which comprises a payload described herein may be a large double stranded vector genome. A large double stranded vector genome may be 2.2 to 3.0 kb in size such as about 2.2, 2.3, 2.4, 2.5, 2.6, 2.7, 2.8, 2.9 and 3.0 kb in size. As a non-limiting example, the large double stranded vector genome may be 2.4 kb in size. Additionally, the vector genome may comprise a promoter and a polyA tail. AAV serotypes

[0119] AAV particles of the present disclosure may comprise or be derived from any natural or recombinant AAV serotype, According to the present disclosure, the AAV particles may utilize or be based on a serotype or comprise a peptide selected from any of the following: VOY101, VOY201, AAV9, AAV9 K449R, AAVPHP.B (PHP.B), AAVPHP.A (PHP.A), AAVG2B-26, AAVG2B-13, AAVTH1.1-32, AAVTH1.1-35, AAVPHP.B2 (PHP.B2), AAVPHP.B3 (PHP.B3), AAVPHP.N/PHP.B-DGT, AAVPHP.B-EST, AAVPHP.B-GGT, AAVPHP.B-ATP, AAVPHP.B-ATT-T, AAVPHP.B-DGT-T, AAVPHP.B-GGT-T, AAVPHP.B-SGS, AAVPHP.B-AQP, AAVPHP.B-QQP, AAVPHP.B-SNP(3), AAVPHP.B-SNP, AAVPHP.B-QGT, AAVPHP.B-NQT, AAVPHP.B-EGS, AAVPHP.B-SGN, AAVPHP.B-EGT, AAVPHP.B-DST, AAVPHP.B-DST, AAVPHP.B-STP, AAVPHP.B-PQP, AAVPHP.B-SQP, AAVPHP.B-QLP, AAVPHP.B-TMP, AAVPHP.B-TTP, AAVPHP.S/G2A12, AAVG2A15/G2A3 (G2A3), AAVG2B4 (G2B4), AAVG2B5 (G2B5), PHP.S, AAV1, AAV2, AAV2G9, AAV3, AAV3a, AAV3b, AAV3-3, AAV4, AAV4-4, AAV5, AAV6, AAV6.1, AAV6.2, AAV6.1,2, AAV7, AAV7.2, AAV8, AAV9, AAV9.11, AAV9.13, AAV9.16, AAV9.24, AAV9.45, AAV9.47, AAV9.61, AAV9.68, AAV9.84, AAV9.9, AAV10, AAV11, AAV12, AAV16.3, AAV24.1, AAV27.3, AAV42.12, AAV42-1b, AAV42-2, AAV42-3a, AAV42-3b, AAV42-4, AAV42-5a, AAV42-5b, AAV42-6b, AAV42-8, AAV42-10, AAV42-11, AAV42-12, AAV42-13, AAV42-15, AAV42-aa, AAV43-1, AAV43-12, AAV43-20, AAV43-21, AAV43-23, AAV43-25, AAV43-5, AAV44.1, AAV44.2, AAV44.5, AAV223.1, AAV223.2, AAV223.4, AAV223.5, AAV223.6, AAV223.7, AAV1-7/rh.48, AAV1-8/rh.49, AAV2-15/rh.62, AAV2-3/rh.61, AAV2-4/rh.50, AAV2-5/rh.51, AAV3.1/hu.6, AAV3.1./hu.9, AAV3-9/rh.52, AAV3-11/rh.53, AAV4-8/r11.64, AAV4-9/rh.54, AAV4-19/rh.55, AAV5-3/rh.57, AAV5-22/rh.58, AAV7.3/hu.7, AAV16.8/hu.10, AAV16.12/hu.11, AAV29.3/bb.1, AAV29.5/bb.2, AAV106.1 /hu.37, AAV 114.3/hu.40, AAV127.2/hu.41, AAV127.5/hu.42, AAV128.3/hu.44, AAV130.4/hu.48, AAV145.1/hu.53, AAV145.5/hu.54, AAV145.6/hu.55, AAV161.10/hu.60, AAV161.6/hu.61, AAV33.12/hu.17, AAV33.4/hu.15, AAV33.8/hu.16, AAV52/hu.19, AAV52.1/hu.20, AAV58.2/hu.25, AAVA3.3, AAVA3.4, AAVA3.5, AAVA3.7, AAVC1, AAVC2, AAVC5, AAV-DJ, AAV-DJ8, AAVF3, AAVF5, AAVH2, AAVrh.72, AAVhu.8, AAVrh.68, AAVrh.70, AAVpi.1, AAVpi.3, AAVpi.2, AAVrh.60, AAVrh.44, AAVrh.65, AAVrh.55, AAVrh.47, AAVrh.69, AAVrh.45, AAVrh.59, AAVhu.12, AAVH6, AAVLK03, AAVH-1/hu.1, AAVH-5/hu.3, AAVLG-10/rh.40, AAVLG-4/rh.38, AAVLG-9/hu.39, AAVN721-8/rh.43, AAVCh.5, AAVCh.5R1, AAVcy.2, AAVcy.3, AAVcy.4, AAVcy.5, AAVCy.5R1, AAVCy.5R2, AAVCy.5R3, AAVCy.5R4, AAVcy.6, AAVhu.1, AAVhu.2, AAVhu.3, AAVhu.4, AAVhu.5, AAVhu.6, AAVhu.7, AAVhu.9, AAVhu.10, AAVhu.11, AAVhu.13, AAVhu.15, AAVhu.16, AAVhu.17, AAVhu.18, AAVhu.20, AAVhu.21, AAVhu.22, AAVhu.23.2, AAVhu.24, AAVhu.25, AAVhu.27, AAVhu.28, AAVhu.29, AAVhu.29R, AAVhu.31, AAVhu.32, AAVhu.34, AAVhu.35, AAVhu.37, AAVhu.39, AAVhu.40, AAVhu.41, AAVhu.42, AAVhu.43, AAVhu.44, AA.Vhu.44R1, AAVhu.44R2, AAVhu.44R3, AAVhu.45, AAVhu.46, AAVhu.47, AAVhu.48, AAVhu.48R.1, AAVhu.48R2, AAVhu.48R3, AAVhu.49, AAVhu.51, AAVhu.52, AAVhu.54, AAVhu.55, AAVhu.56, AAVhu.57, AAVhu.58, AAVhu.60, AAVhu.61, AAVhu.63, AAVhu.64, AAVhu.66, AAVhu.67, AAVhu.14/9, AAVhu.t 19, AAVrh.2, AAVrh.2R, AAVrh.8, AAVrh.8R, AAVrh.10, AAVrh.12, AAVrh.13, AAVrh.13R, AAVrh.14, AAVrh.17, AAVrh.18, AAVrh.19, AAVrh.20, AAVrh.21, AAVrh.22, AAVrh.23, AAVrh.24, AAVrh.25, AAVrh.31, AAVrh.32, AAVrh.33, AAVrh.34, AAVrh.35, AAVrh.36, AAVrh.37, AAVrh.37R2, AAVrh.38, AAVrh.39, AAVrh.40, AAVrh,46, AAVrh,48, AAVrh.48.1, AAVrh.48.1.2, AAVrh.48.2, AAVrh.49, AAVrh.51, AAVrh.52, AAVrh.53, AAVrh.54, AAVrh.56, AAVrh.57, AAVrh.58, AAVrh.61, AAVrh.64, AAVrh.64R1, AA.Vrh.64R2, AAVrh.67, AAVrh.73, AAVrh.74, AAVrh.8R, AAVrh8R A586R mutant, AAVrh8R R533A mutant, AAAV, BAAV, caprine AAV, bovine AAV, AAVhE1.1, AAVhEr1.5, AAVhER1.14, AAVhEr1.8, AAVhEr1.16, AAVhEr1.18, AAVhEr1.35, AAVhEr1.7, AAVhEr1.36, AAVhEr2.29, AAVhEr2.4, AAVhEr2.16, AAVhEr2.30, AAVhEr2.31, AAVhEr2.36, AAVhER1.23, AAVhEr3.1, AAV2.5T , AAV-PAEC, AAV-LK01, AAV-LK02, AAV-LK03, AAV-LK04, AAV-LK05, AAV-LK06, AAV-LK07, AAV-LK08-AAV-LK09, AAV-LK10, AAV-LK11, AAV-LK12, AAV-LK13, AAV-LK14, AAV-LK15, AAV-LK16, AAV-LK17, AAV-LK18, AAV-LK19, AAV-PAEC2, AAV-PAEC4, AAV-PAEC6, AAV-PAEC7, AAV-PAEC8, AAV-PAEC11, AAV-PAEC12, AAV-2-pre-miRNA-101 , AAV-8h, AAV-8b, AAV-h, AAV-b, AAV SM 10-2 , AAV Shuffle 100-1, AAV Shuffle 100-3, AAV Shuffle 100-7, AAV Shuffle 10-2, AAV Shuffle 10-6, AAV Shuffle 10-8, AAV Shuffle 100-2, AAV SM 10-1, AAV SM 10-8 , AAV SM 100-3, AAV SM 100-10, BNP61 AAV, BNP62 AAV, BNP63 AAV, AAVrh.50, AAVrh.43, AAVrh.62, AAVrh.48, AAVhu.19, AAVhu.11, AAVhu.53, AAV4-8/rh.64, AAVLG-9/hu.39, AAV54.5/hu.23, AAV54.2/hu.22, AAV54.7/hu24, AAV54.1 /hu.21, AAV54.4R/hu.27, AAV46,2/hu.28, AAV46.6/hu.29, AAV128.1/hu.43, true type AAV (ttAAV), UPENN AAV 10, Japanese AAV 10 serotypes, AAV CBr-7.1, AAV CBr-7.10, AAV CBr-7.2, AAV CBr-7.3, AAV CBr-7.4, AAV CBr-7.5, AAV CBr-7.7, AAV CBr-7.8, AAV CBr-B7.3, AAV CBr-B7.4,AAV CBr-E1, AAV CBr-E2, AAV CBr-E3, AAV CBr-E4, AAV CBr-E5, AAV CBr-e5, AAV CBr-E6, AAV CBr-E7, AAV CBr-E8, AAV CHt-1, AAV CHt-2, AAV CHt-3, AAV CHt-6.1, AAV CHt-6.10, AAV CHt-6.5, AAV CHt-6.6, AAV CHt-6.7, AAV CHt-6.8, AAV CHt-P1, AAV CHt-P2, AAV CHt-P5, AAV CHt-P6, AAV CHt-P8, AAV CHt-P9, AAV CKd-1,AAV CKd-10,AAV CKd-2, AAV CKd-3, AAV CKd-4, AAV CKd-6, AAV CKd-7, AAV CKd-8, AAV CKd-B1, AAV CKd-B2, AAV CKd-B3, AAV CKd-B4, AAV CKd-B5, AAV CKd-B6, AAV CKd-B7, AAV CKd-B8, AAV CKd-H1, AAV CKd-H2, AAV CKd-H3, AAV CKd-H4, AAV CKd-H5, AAV CKd-H6, AAV CKd-N3, AAV CKd-N4,AAV CKd-N9, AAV CLg-F1, AAV CLg-F2, AAV CLg-F3, AAV CLg-F4, AAV CLg-F5, AAV CLg-F6, AAV CLg-F7, AAV CLg-F8, AAV CLv-1, AAV CLv1-1, AAV Clvh1-10, AAV CLv1-2, AAV CLv-12, AAV CLv1-3, AAV CLv-13, AAV CLv1-4, AAV Clv1-7, AAV Clv1-8, AAV Clv1-9, AAV CLv-2, AAV CLv-3, AAV CLv-4, AAV CLv-6, AAV CLv-8, AAV CLv-D1, AAV CLv-D2, AAV CLv-D3, AAV CLv-D4, AAV CLv-D5, AAV CLv-D6, AAV CLv-D7, AAV CLv-D8, AAV CLv-E1, AAV CLv-K1, AAV CLv-K3, AAV CLv-K6, AAV CLv-L4, AAV CLv-L5, AAV CLv-L6, AAV CLv-M1, AAV CLv-M11, AAV CLv-M2, AAV CLv-M5, AAV CLv-M6, AAV CLv-M7, AAV AAV CLv-8, AAV CLv-M9, AAV CLv-R1, AAV CLv-R2, AAV CLv-R3, AAV CLv-R4, AAV CLv-R5, AAV CLv-R6, AAV CLv-R7, AAV CLv-R8, AAV CLv-R9, AAV CSp-1, AAV CSp-10, AAV CSp-11, AAV CSp-2, AAV CSp-3, AAV CSp-4, AAV CSp-6, AAV CSp-7, AAV CSp-8, AAV CSp-8.10, AAV CSp-8.2, AAV CSp-8.4, AAV CSp-8.5, AAV CSp-8.6, AAV CSp-8.7-AAV CSp-8.8, AAV CSp-8.9, AAV CSp-9, AAV.hu.48R3, AAV.VR-355, AAV3B, AAV4, AAV5, AAVF1/HSC1, AAVF11/HSC11, AAVF12/HSC12, AAVF13/HSC 13, AAVF14/HSC14, AAVF15/HSC15, AAVF16/HSC16, AAVF17/HSC17, AAVF2/HSC2, AAVF3/HSC3, AAVF4/HSC4, AAVF5/HSC5, AAVF6/HSC6, AAVF7/HSC7, AAVF8/HSC8, and/or AAVF9/HSC9, and variants or hybrids/chimeras/combinations thereof.

[0120] In certain embodiments, an A.AV serotype used in a composition disclosed herein may be, or comprise, a sequence as described in U.S. Patent Application Publication No. U.S. Pat. No. 20030138772, (the content of which is incorporated herein by reference in its entirety as related to AAV capsids insofar as it does not conflict with the present disclosure), such as, but not limited to, AAV! (SEQ ID NO: 6 and 64 of U.S. Pat. No. 20030138772), AAV2 (SEQ ID NO: 7 and 70 of U.S. Pat. No. 20030138772), AAV3 (SEQ ID NO: 8 and 71 of U.S. Pat. No. 20030138772), AAV4 (SEQ ID NO: 63 of U.S. Pat. No. 20030138772), AAV5 (SEQ ID NO: 114 of U.S. Pat. No. 20030138772), AAV6 (SEQ ID NO: 65 of U.S. Pat. No. 20030138772.), AAV7 (SEQ ID NO: 1-3 of U.S. Pat. No. 20030138772), AAV8 (SEQ ID NO: 4 and 95 of U.S. Pat. No. 20030138772), AAV9 (SEQ ID NO: 5 and 100 of U.S. Pat. No. 20030138772), AAV10 (SEQ ID NO: 117 of U.S. Pat. No. 20030138772), AAV11 (SEQ ID NO: 118 of U.S. Pat. No. 20030138772), AAV12 (SEQ ID NO: 119 of U.S. Pat. No. 200301.38772), AAVrh10 (amino acids 1 to 738 of SEQ ID NO: 81 of U.S. Pat. No. 200301.38772), AAV16.3 (U520030138772 SEQ ID NO: 10), AAV29.3/bb.1 (U.S. Pat. No. 20030138772 SEQ ID NO: 11), AAV29.4 (U.S. Pat. No. 20030138772 SEQ ID NO: 12), AAV29.5/bb.2 (U.S. Pat. No. 20030138772 SEQ ID NO: 13), AAV1.3 (U.S. Pat. No. 20030138772 SEQ ID NO: 14), AAV13.3 (U520030138772 SEQ ID NO: 5), AAV24.1 (U520030138772 SEQ ID NO: 16), AAV27.3 (U.S. Pat. No. 20030138772 SEQ IL) NO: 17)-NAV7.2 (U.S. Pat. No. 20030138772 SEQ ID NO: 18), AAVC1 (U.S. Pat. No. 20030138772 SEQ ID NO: 19), AAVC3 (U.S. Pat. No. 20030138772 SEQ ID NO: 20), AAVC5 (U.S. Pat. No. 20030138772 SEQ ID NO: 21), AAVE1 (U.S. Pat. No. 20030138772 SEQ ID NO: 22), AAVF3 (U.S. Pat. No. 20030138772 SEQ ID NO: 23), AAVF5 (U.S. Pat. No. 20030138772 SEQ ID NO: 24), AAVH6 (U.S. Pat. No. 20030138772 SEQ ID NO: 25). AAVH2 (U520030138772 SEQ ID NO: 26), AAV42-8 (U520030138772 SEQ ID NO: 27), AAV42-15 (U520030138772 SEQ ID NO: 28), AAV42-5b (U.S. Pat. No. 20030138772 SEQ ID NO: 29), AAV42-1b (U.S. Pat. No. 20030138772 SEQ ID NO: 30), AAV42-13 (U.S. Pat. No. 20030138772 SEQ ID NO: 31), AAV42-3a (U.S. Pat. No. 20030138772 SEQ ID NO: 32), AAV42-4 (U.S. Pat. No. 20030138772 SEQ ID NO: 33), AAV42-5a (U520030138772 SEQ ID NO: 34), AAV42-10 (U.S. Pat. No. 20030138772 SEQ ID NO: 35), AAV42-3b (U.S. Pat. No. 20030138772 SEQ ID NO: 36), AAV42-11 (U.S. Pat. No. 20030138772 SEQ ID NO: 37), AAV42-6b (U.S. Pat. No. 20030138772 SEQ NO: 38), AAV43-1 (U.S. Pat. No. 20030138772 SEQ ID NO: 39), AAV43-5 (U.S. Pat. No. 20030138772 SEQ ID NO: 40), AAV43-12 (U.S. Pat. No. 20030138772 SEQ ID NO: 41), AAV43-20 (U.S. Pat. No. 20030138772 SEQ ID NO: 42), AAV43-21 (U.S. Pat. No. 20030138772 SEQ NO: 43), AAV43-23 (U.S. Pat. No. 20030138772 SEQ ID NO: 44), AAV43-25 (U.S. Pat. No. 20030138772 SEQ ID NO: 45), AAV44.1 (U.S. Pat. No. 20030138772 SEQ ID NO: 46), AAV44.5 (U.S. Pat. No. 20030138772 SEQ ID NO: 47), AAV223.1 (U.S. Pat. No. 20030138772 SEQ ID NO: 48), AAV223.2 (U.S. Pat. No. 20030138772 SEQ ID NO: 49), AAV223.4 (U.S. Pat. No. 20030138772 SEQ ID NO: 50), AAV223.5 (U.S. Pat. No. 20030138772 SEQ ID NO: 51), AAV223.6 (U.S. Pat. No. 20030138772 SEQ ID NO: 52), AAV223.7 CU.S. Pat. No. 20030138772 SEQ ID NO: 53), AAVA3.4 (U.S. Pat. No. 20030138772 SEQ ID NO: 54), AAVA3.5 (U.S. Pat. No. 20030138772 SEQ ID NO: 55), AAVA3.7 (U.S. Pat. No. 20030138772 SEQ ID NO: 56), AAVA3.3 (U.S. Pat. No. 20030138772 SEQ NO: 57), AAV42.12 (U.S. Pat. No. 20030138772 SEQ ID NO: 58), AAV44,2 (U.S. Pat. No. 20030138772 SEQ ID NO: 59) AAV42-2 (U.S. Pat. No. 20030138772 SEQ ID NO: 9), or variants or hybridslchimeraslcombinations thereof.

[0121] In certain embodiments, the AAV serotype may be, or comprise, a sequence as described in U.S. Patent Application Publication No. U.S. Pat. No. 20150159173 (the content of which is incorporated herein by reference in its entirety as related to AAV capsids, insofar as it does not conflict with the present disclosure), such as, but not limited to. AAV2 (SEQ ID NO: 7 and 23 of U.S. Pat. No. 20150159173), 600 (SEQ ID NO: 1 of U.S. Pat. No. 201501.59173), 1702/33 (SEQ NO: 2 of U.S. Pat. No. 20150159173), rh39 (SEQ ID NO: 3, 20 and 36 of U.S. Pat. No. 201501.59173), rh46 (SEQ ID NO: 4 and 22 of U.S. Pat. No. 20150159173), rh73 (SEQ ID NO: 5 of U.S. Pat. No. 20150159173), rh74 (SEQ ID NO: 6 of U.S. Pat. No. 20150159173), AAV6.1 (SEQ ID NO: 29 of U.S. Pat. No. 20150159173), rh.8 (SEQ ID NO: 41 of U.S. Pat. No. 20150159173), rh.48.1 (SEQ ID NO: 44 of U.S. Pat. No. 201.50159173), hu.44 (SEQ ID NO: 45 of U.S. Pat. No. 20150159173), hu.29 (SEQ ID NO: 42 of U.S. Pat. No. 20150159173), hu.48 (SEQ ID NO: 38 of U.S. Pat. No. 20150159173), rh54 (SEQ ID NO: 49 of U.S. Pat. No. 20150159173), AAV2 (SEQ ID NO: 7 of U.S. Pat. No. 20150159173), cy.5 (SEQ ID NO: 8 and 24 of U.S. Pat. No. 20150159173), rh.10 (SEQ ID NO: 9 and 25 of U.S. Pat. No. 20150159173), rh.13 (SEQ ID NO: 10 and 26 of U.S. Pat. No. 201.50159173), AAV1 (SEQ ID NO: 11 and 27 of U.S. Pat. No. 20150159173), AAV3 (SEQ ID NO: 12 and 28 of U.S. Pat. No. 20150159173), AAV6 (SEQ ID NO: 13 and 29 of U.S. Pat. No. 20150159173), AAV7 (SEQ ID NO: 14 and 30 of U.S. Pat. No. 20150159173), AAV8 (SEQ ID NO: 15 and 31 of U.S. Pat. No. 20150159173), hu.13 (SEQ ID NO: 16 and 32 of U.S. Pat. No. 20150159173), hu.26 (SEQ ID NO: 17 and 33 of U.S. Pat. No. 20150159173), hu.37 (SEQ ID NO: 18 and 34 of U.S. Pat. No. 20150159173), hu.53 (SEQ ID NO: 19 and 35 of U.S. Pat. No. 20150159173), rh.43 (SEQ ID NO: 21 and 37 of U.S. Pat. No. 20150159173), rh2 (SEQ ID NO: 39 of U.S. Pat. No. 201501591.73), rh.37 (SEQ ID NO: 40 of U.S. Pat. No. 201501591.73), rh.64 (SEQ ID NO: 43 of U.S. Pat. No. 201501591.73), rh.48 (SEQ ID NO: 44 of U.S. Pat. No. 20150159173), ch.5 (SEQ ID NO 46 of U.S. Pat. No. 20150159173)- rh.67 (SEQ ID NO: 47 of U.S. Pat. No. 20150159173), rh.58 (SEQ ID NO: 48 of U.S. Pat. No. 20150159173), or variants thereof comprising, but not limited to Cy5R1, Cy5R2, Cy5R3, Cy5R4, rh,13R, rh.37R2, rh,2R, rh.8R, 1711.48.1, 171148.2, rh.48.1.2, hu.44R1, hu.44R2, hu.44R3, hu.29R, ch.5R1, rh64R1, rh64R2, AAV6.2, AAV6.1, AAV6.12, hu.48R1, hu.48R2, or hu.48R3, or a variant or hybrid/chimera/combination thereof.

[0122] In certain embodiments, the AAV serotype may be, or comprise, a sequence as described in U.S. Pat. No. 7,198,951 (the content of which is incorporated herein by reference in its entirety as related to AAV capsids, insofar as it does not conflict with the present disclosure), such as, but not limited to, AAV9 (SEQ ID NO: 1-3 of U.S. Pat. No. 7,198,951), AAV2 (SEQ ID NO: 4 of U.S. Pat. No. 7,198,951), AAV1 (SEQ ID NO: 5 of U.S. Pat. No. 7,198,951), AAV3 (SEQ ID NO: 6 of U.S. Pat. No. 7,198,951), or AAV8 (SEQ ID NO: 7 of U.S. Pat. No. 7,198,951), or a variant or hybrid/chimera or combination thereof.

[0123] In certain embodiments, the AAV serotype may be the AAV9 sequence as described by N Pulicherla et al. (Molecular Therapy 19(6):1070-1078 (2011) (the content of which is incorporated herein by reference in its entirety as related to AAV capsids, insofar as it does not conflict with the present disclosure), or may he a variant thereof, such as but not limited to, AAV9.9, AAV9.11, AA.V9.13, AAV9.16, AAV9.24, AAV9.45, -NAV9.45, AAV9.47, AAV9.61, AAV9.68, or AAV9.84.

[0124] In certain embodiments, the AAV serotype may he, or comprise, a sequence as described in U.S. Pat. No. 6,156,303 (the content of which is incorporated herein by reference in its entirety as related to AAV capsids, insofar as it does not conflict with the present disclosure), such as, but not limited to, AAV3B (SEQ ID NO: 1 and 10 of U.S. Pat. No. 6,156,303), AAV6 (SEQ ID NO: 2, 7 and 11 of U.S. Pat. No. 6,156,303), AAV2 (SEQ ID NO: 3 and 8 of U.S. Pat. No. 6,156,303), AAV3A (SEQ ID NO: 4 and 9, of U.S. Pat. No. 6,156,303), or a derivative or a variant or hybrid/chimera or combination thereof.

[0125] In certain embodiments, the AAV serotype may be, or comprise, a sequence as described in U.S. Patent Application Publication No. U.S. Pat. No. 20140359799 (the content of which is incorporated herein by reference in its entirety as related to AAV capsids, insofar as it does not conflict with the present disclosure), such as, but not limited to, AAV8 (SEQ ID NO: 1 of U.S. Pat. No. 20140359799), AAVDJ (SEQ ID NO: 2 and 3 of U.S. Pat. No. 20140359799), or variants thereof.

[0126] In certain embodiments, the serotype may be AAVDJ or a variant thereof, such as AAVDJ8 (or AAV-DJ8), as described by Grimm et al. (Journal of Virology 82(12): 5887-5911 (2008), the content of which is incorporated herein by reference in its entirety as related to AAV capsids, insofar as it does not conflict with the present disclosure). The amino acid sequence of AAVDJ8 may comprise two or more mutations effective to remove the heparin binding domain (I-IBD). As a non-limiting example, the AAV-DJ sequence described as SEQ ID NO: 1 in U.S. Pat. No. 7,588,772 (the content of which is incorporated herein by reference in its entirety as related to AAV capsids, insofar as it does not conflict with the present disclosure), may comprise two mutations: (1) R587Q where arginine (R; Arg) at amino acid 587 is changed to glutamine (Q; Gln) and (2) R590T where arginine (R; Arg) at amino acid 590 is changed to threonine (T; Thr). As another non-limiting example, the AAV-DJ sequence described in U.S. Pat. No. 7,588,772 may comprise three mutations: (1) K406R where lysine (K; Lys) at amino acid 406 is changed to arginine (R; Arg), (2) R587Q where arginine (R; Arg) at amino acid 587 is changed to glutamine (Q; Gin) and (3) R590T where arginine (R; Arg) at amino acid 590 is changed to threonine (T; Thr).

[0127] In certain embodiments, the AAV serotype may be, or comprise, a sequence of AAV4 as described in International Publication No. WO1998011244 (the content of which is incorporated herein by reference in its entirety as related to AAV capsids, insofar as it does not conflict with the present disclosure), such as, but not limited to AAV4 (SEQ ID NO: 1-20 of WO1998011244).

[0128] In certain embodiments, the AAV serotype may be, or comprise, a mutation in the AAV2 sequence to generate AAV2G9 as described in International Publication No. WO2014144229 (the content of which is incorporated herein by reference in its entirety as related to AAV capsids, insofar as it does not conflict with the present disclosure)

[0129] In certain embodiments, the AAV serotype may be, or comprise, a sequence as described in International Publication No. WO2005033321 (the content of which is incorporated herein by reference in its entirety as related to AAV capsids, insofar as it does not conflict with the present disclosure), such as, but not limited to AAV3-3 (SEQ ID NO: 217 of WO200503332 AAV 1 (SEQ ID NO: 219 and 202 of WO2005033321), AAV106.1,cliu.37 (SEQ ID No: 10 of WO2005033321), AAV114.3/hu.40 (SEQ ID No: 11 of WO2005033321), AAV127.2/hu.41 (SEQ ID NO:6 and 8 of WO2005033321), AAV128.3/hu.44 (SEQ ID No: 81 of WO2005033321), AAV130.4/hu.48 (SEQ ID NO: 78 of WO2005033321), AAV145.1/hu.53 (SEQ ID No: 176 and 177 of WO2005033321), AAV145.6/hu.56 (SEQ ID NO: 168 and 192 of WO2005033321), AAV16.12/hu.11 (SEQ ID NO: 153 and 57 of WO2005033321), AAV1.6.8/hu.10 (SEQ m NO: 156 and 56 of WO2005033321), AAV161.10/hu.60 (SEQ ID No: 170 of WO2005033321), AAV161.6/hu.61 (SEQ ID No: 174 of WO2005033321), AAV1-7/rh.48 (SEQ ID NO: 32 of WO2005033321), AAV1-8/rh.49 (SEQ ID NOs: 103 and 25 of WO2005033321)-NAV2 (SEQ ID NO: 211 and 221 of WO2005033321), AAV2-15/rh.62 (SEQ ID No: 33 and 114 of WO2005033321), AAV2-3/rh.61 (SEQ ID NO: 21 of WO2005033321), AAV2-4/rh.50 (SEQ ID No: 23 and 108 of WO2005033321), AAV2-5/rh.51 (SEQ ID NO: 104 and 22 of WO2005033321), AAV3.1./hu.6 (SEQ ID NO: 5 and 84 of WO2005033321), AAV3.1/hu.9 (SEQ ID NO: 155 and 58 of WO2005033321), AAV3-11/rh.53 (SEQ ID NO: 186 and 176 of WO2005033321), AAV3-3 (SEQ ID NO: 200 of WO2005033321), AAV33.12/hu.17 (SEQ ID NO:4 of WO2005033321), AAV33.4/hu.15 (SEQ ID No: 50 of WO2005033321), AAV33.8/hu.16 (SEQ ID No: 51 of WO2005033321), AAV3-9/rh.52 (SEQ ID NO: 96 and 18 of WO2005033321), AAV4-19/rh.55 (SEQ ID NO: 117 of WO2005033321), AAV4-4 (SEQ ID NO: 201 and 218 of WO2005033321), AAV4-9/rh.54 (SEQ ID NO: 116 of WO2005033321), AAV5 (SEQ ID NO: 199 and 216 of WO2005033321), AAV52.1/hu.20 (SEQ ID NO: 63 of WO2005033321), AAV52/hu.19 (SEQ ID NO: 133 of WO2005033321), AAV5-22/rh.58 (SEQ m No: 27 of WO2005033321), AAV5-3/rh57 (SEQ ID NO: 105 of WO2005033321), AV5-3/rh.57 (SEQ ID No: 26 of WO2005033321), AAV58.2thu.25 (SEQ ID No: 49 of WO2005033321), AAV6 (SEQ ID NO: 203 and 220 of WO2005033321, AAV7 (SEQ ID NO: 222 and 213 of WO2005033321), AAV7.3/hu.7 (SEQ ID No: 55 of WO2005033321), AAV8 (SEQ ID NO: 223 and 214 of WO2005033321), AAVH-1/hu.1 (SEQ ID No: 46 of WO2005033321), AAVH-5/hu.3 (SEQ ID No: 44 of WO2005033321), AAVhu.1 (SEQ ID NO: 144 of WO2005033321), AA Vhu.10 (SEQ ID NO: 156 of WO2005033321), AAVhu.11 (SEQ ID NO: 153 of WO2005033321), AAVhu.12 (WO2005033321 SEQ ID NO: 59), AAVhu.13 (SEQ ID NO: 129 of WO2005033321), AAVhu.14/AAV9 (SEQ ID NO: 123 and 3 of WO2005033321), AAVhu.15 (SEQ ID NO: 147 of WO2005033321), AAVhu.16 (SEQ ID NO: 148 of WO2005033321), AAVhu.17 (SEQ ID NO: 83 of WO2005033321), AAVhu.18 (SEQ ID NO: 149 of WG2005033321), AAVhu.19 (SEQ ID NO: 133 of WO2005033321), AAVhu.2 (SEQ ID NO: 143 of WO2005033321), AAVhu.20 (SEQ ID NO: 134 of WO2005033321), AAVhu.21 (SEQ ID NO: 135 of WO2005033321), AAVhu.22 (SEQ ID NO: 138 of WO2005033321), AAVhu.23.2 (SEQ ID NO: 137 of WO2005033321), AAVhu.24 (SEQ ID NO: 136 of WO2005033321), AAVhu.25 (SEQ ID NO: 146 of WO2005033321), AAVhu.27 (SEQ ID NO: 140 of WO2005033321), AAVhu.29 (SEQ IL) NO: 132 of WO2005033321), AAVhu.3 (SEQ ID NO: 145 of WO2005033321), AAVhu.31 (SEQ ID NO: 121 of WO2005033321), AAVhu.32 (SEQ ID NO: 122 of WO2005033321), AAVhu.34 (SEQ ID NO: 125 of WO2005033321), AAVhu.35 (SEQ IL) NO: 164 of WO2005033321), AAVhu.37 (SEQ ID NO: 88 of WO2005033321), AAVhu.39 (SEQ ID NO: 102 of WO2005033321), AAVhu.4 (SEQ ID NO: 141 of WO2005033321), AAVhu.40 (SEQ ID NO: 87 of WO2005033321), AAVhu.41 (SEQ ID NO: 91 of WO2005033321), AAVhu.42 (SEQ ID NO: 85 of WO2005033321), AAVhu.43 (SEQ ID NO: 160 of WO2005033321), AAVhu.44 (SEQ NO: 144 of WO2005033321), AAVhu.45 (SEQ ID NO: 127 of WO2005033321), AAVhu.46 (SEQ ID NO: 159 of WO2005033321), AAVhu.47 (SEQ ID NO: 128 of WO2005033321), AAVhu.48 (SEQ ID NO: 157 of WO2005033321), AAVhu.49 (SEQ NO: 189 of WO2005033321), AAVhu.51 (SEQ ID NO: 190 of WO2005033321), AAVhu.52 (SEQ ID NO: 191 of WO2005033321), AAVhu.53 (SEQ ID NO: 186 of WO2005033321), AAVhu.54 (SEQ ID NO: 188 of WO2005033321), AAVhu.55 (SEQ ID NO: 187 of WO2005033321), AAVhu.56 (SEQ ID NO: 192 of WO2005033321), AAVhu.57 (SEQ ID NO: 193 of WO2005033321), AAVhu.58 (SEQ ID NO: 194 of WO2005033321), AAVhu.6 (SEQ ID NO: 84 of WO2005033321), AAVhu.60 (SEQ ID NO: 184 of WO2005033321), AAVhu.61 (SEQ ID NO: 185 of WO2005033321), AAVhu.63 (SEQ ID NO: 195 of WO2005033321), AAVhu.64 (SEQ ID NO: 196 of WO2005033321), AAVhu.66 (SEQ ID NO: 197 of WO2005033321), AAVhu.67 (SEQ ID NO: 198 of WO2005033321), AAVhu.7 (SEQ m NO: 150 of WO2005033321), AAVhu.8 (WO2005033321 SEQ ID NO: 12), AAVhu.9 (SEQ ID NO: 155 of WO2005033321), AAVLG-10/rh.40 (SEQ ID No: 14 of WO2005033321), AAVLG-4/rh.38 (SEQ ID NO: 86 of WO2005033321), AAVLG-4/rh.38 (SEQ ID No: 7 of WO2005033321), AAVN721-8/rh,43 (SEQ ID NO: 163 of WO2005033321), AAVN721-8/rh.43 (SEQ ID No: 43 of WO2005033321), AAVpi.1 (WO2005033321 SEQ ID NO: 28), AAVpi.2 (WO2005033321 SEQ ID NO: 30), AAVpi.3 (WO2005033321 SEQ ID NO: 29), AAVrh.38 (SEQ ID NO: 86 of WO2005033321), AAVrh.40 (SEQ ID NO: 92 of WO2005033321), AAVrh.43 (SEQ ID NO: 163 of WO2005033321), AAVrh.44 (WO2005033321 SEQ ID NO: 34), AAVrh.45 (WO2005033321 SEQ ID NO: 41), AAVrh.47 (WO2005033321 SEQ NO: 38), AAVrh.48 (SEQ NO: 115 of WO2005033321), AAVrh.49 (SEQ ID NO: 103 of WO2005033321), AAVrh.50 (SEQ ID NO: 108 of WO2005033321), AAVrh.51 (SEQ ID NO: 104 of WO2005033321), AAVrh.52 (SEQ ID NO: 96 of WO2005033321), AAA/rh53 (SEQ ID NO: 97 of WO2005033321), AAVrh.55 (WO2005033321 SEQ ID NO: 37), AAVrh.56 (SEQ ID NO: 152 of WO2005033321), AAVrh.57 (SEQ ID NO: 105 of WO2005033321), AAVrh.58 (SEQ ID NO: 106 of WO2005033321), AAVrh.59 (WO2005033321 SEQ ID NO: 42), AAVrh.60 (WO2005033321 SEQ ID NO: 31)-NAVrh.61 (SEQ ID NO: 107 of WO2005033321), AAVrh.62 (SEQ m NO: 114 of WO2005033321), AAVrh.64 (SEQ ID NO: 99 of WO2005033321), AAVrh.65 (WO2005033321 SEQ ID NO: 35), AAVrh.68 (WO2005033321 SEQ ID NO: 16), AAVrh.69 (WO2005033321 SEQ ID NO: 39), AAVrh.70 (WO2005033321 SEQ ID NO: 20), AAVrh.72 (WO2005033321 SEQ ID NO: 9), or variants thereof comprising, but not limited to, AAVcy.2, AAVcy.3, AAVcy.4, AAVcy.5, AAVcy.6, AAVrh.12, AAVrh.17, AAVrh.18, AAVrh.19, AAVrh.21, AAVrh.22, AAVrh.23, AAVrh.24, AAVrh.25. AAVrh.25/42 15, AAVrh.31, AAVrh.32, AAVrh.33, AAVrh.34, AAVrh.35, AAVrh.36, AAVrh.37, or AAVrh14 (the contents of which are each incorporated herein by reference in their entireties as related to AAV capsids, insofar as they do not conflict with the present disclosure). Non limiting examples of variants comprise SEQ ID NO: 13, 15, 17, 19, 24, 36, 40, 45, 47, 48, 51, 52, 53, 54, 60, 61, 62, 64, 65, 66, 67, 68, 69 70, 71, 72, 73, 74, 75, 76, 77, 79, 80. 82, 89, 90, 93, 94, 95, 98. 100, 101, 109,110, 111, 112, 113, 118, 119, 120, 124, 126, 131, 139, 142, 151, 154, 158, 161, 162, 165, 166, 167, 168, 169, 170, 171, 172, 173, 174, 175, 176, 177, 178, 179, 180, 181, 182, 183, 202, 204, 205, 206, 207, 208, 209, 210, 211, 212, 215, 219, 224, 225, 226, 227, 228, 229, 230, 231, 232, 233, 234, 235 or 236 of WO2005033321 (the content of which is incorporated herein by reference in its entirety as related to AAV capsids, insofar as it does not conflict with the present disclosure).

[0130] In certain embodiments, the AAV serotype may be, or comprise, a sequence as described in International Publication No. WO2015168666 (the content of which is incorporated herein by reference in its entirety as related to AAV capsids, insofar as it does not conflict with the present disclosure), such as, but not limited to, AAVrh8R (SEQ ID NO: 9 of WO2015168666), AAVrh8R A586R mutant (SEQ ID NO: 10 of WO2015168666), AAVrh8R R533A mutant (SEQ ID NO: 11 of WO2015168666), or variants thereof

[0131] In certain embodiments, the AAV serotype may be, or comprise, a sequence as described in U.S. Pat. No. 9,233,131 (the content of which is incorporated herein by reference in its entirety as related to AAV capsids, insofar as it does not conflict with the present disclosure), such as, but not limited to, AAVhE1.1 (SEQ ID NO:44 of U.S. Pat. No. 9,233,131), AAVhEr1.5 (SEQ ID NO:45 of U.S. Pat. No. 9,233,131), AAVhER1.14 (SEQ ID NO:46 of U.S. Pat. No. 9,233,131), AAVhEr1.8 (SEQ NO:47 of U.S. Pat. No. 9,233,131), AAVhEr1.16 (SEQ NO:48 of U.S. Pat. No. 9,233,131), AAVhEr1.18 (SEQ ID NO:49 of U.S. Pat. No. 9,233,131), AAVhEr1.35 (SEQ ID NO:50 of U.S. Pat. No. 5,923,3131), AAVhEr1.7 (SEQ ID NO:51 of U.S. Pat. No. 9,233,131), AAVhEr1.36 (SEQ IL) NO:52 of U.S. Pat. No. 9,233,131), AAVhEr2.29 (SEQ ID NO:53 of U.S. Pat. No. 9,233,131), AAVhEr2.4 (SEQ ID NO:54 of U.S. Pat. No. 9,233,131), AAVhEr2.16 (SEQ ID NO:55 of U.S. Pat. No. 9,233,131), AAVhEr2.30 (SEQ ID NO:56 of U.S. Pat. No. 9,233,131), AAVhEr2.31 (SEQ ID NO:58 of U.S. Pat. No. 9,233,131), AAVhEr2.36 (SEQ ID NO:57 of U.S. Pat. No. 9,233,131), AAVhER1.23 (SEQ ID No. 53 of U.S. Pat. No. 9233131), AAVhEr3.1 (SEQ NO:59 of U.S. Pat. No. 9,233,131), AAV2.5T (SEQ ID NO:42 of U.S. Pat. No. 9,233,131), or variants thereof.

[0132] In certain embodiments, the AAV serotype may be, or comprise, a sequence as described in U.S. Patent Application Publication No. U.S. Pat. No. 20150376607 (the content of which is incorporated herein by reference in its entirety as related to AAV capsids, insofar as it does not conflict with the present disclosure), such as, but not limited to, AAV-PAEC (SEQ ID NO:1 of U.S. Pat. No. 20150376607), AAV-LK01 (SEQ IL) NO:2 of U.S. Pat. No. 20150376607), AAV-LK02 (SEQ NO:3 of U.S. Pat. No. 20150376607)-NAV-LK03 (SEQ NO:4 of U.S. Pat. No. 20150376607), (SEQ ID NO:5 of U.S. Pat. No. 20150376607), AAV-LK05 (SEQ ID NO:6 of US 20150376607), AAV-LK06 (SEQ ID NO:7 of U.S. Pat. No. 20150376607), AAV-LK07 (SEQ ID NO:8 of U.S. Pat. No. 20150376607), AAV-LK08 (SEQ ID NO:9 of U.S. Pat. No. 20150376607), AAV-LK09 (SEQ ID NO:10 of U.S. Pat. No. 20150376607), AAV-LK10 (SEQ ID NO:11 of U.S. Pat. No. 20150376607), AAV-LK11 (SEQ ID NO:12 of U.S. Pat. No. 20150376607), AAV-LK12 (SEQ ID NO:13 of U.S. Pat. No. 20150376607), AAV-LK13 (SEQ ID NO:14 of U.S. Pat. No. 20150376607), AAV-LK14 (SEQ ID NO:15 of U.S. Pat. No. 20150376607), AAV-LK15 (SEQ ID NO:16 of U.S. Pat. No. 20150376607), AAV-LK16 (SEQ ID NO:17 of U.S. Pat. No. 20150376607), AAV-LK17 (SEQ NO:18 of U.S. Pat. No. 20150376607), AAV-LK18 (SEQ ID NO:19 of U.S. Pat. No. 20150376607), AAV-LK19 (SEQ ID NO:20 of U.S. Pat. No. 20150376607), AAV-PAEC2 (SEQ ID NO:21 of U.S. Pat. No. 20150376607), AAV-PAEC4 (SEQ ID NO:22 of U.S. Pat. No. 20150376607), AAV-PAEC6 (SEQ ID NO: 23 of U.S. Pat. No. 20150376607), AAV-PAEC7 (SEQ ID NO:24 of U520150376607), AAV-PAEC8 (SEQ ID NO:25 of U.S. Pat. No. 20150376607), AAV-PAEC11 (SEQ ID NO:26 of U.S. Pat. No. 20150376607), AAV-PAEC12 (SEQ ID NO:27, of U.S. Pat. No. 20150376607), or variants thereof.

[0133] In certain embodiments, the AAV serotype may be, or comprise, a sequence as described in U.S. Pat. No. 9,163,261 (the content of which is incorporated herein by reference in its entirety as related to AAV capsids, insofar as it does not conflict with the present disclosure), such as, but not limited to, AAV-2-pre-miRNA-101 (SEQ ID NO: 1 U.S. Pat. No. 9,163,261), or variants thereof.

[0134] In certain embodiments, the AAV serotype may be, or have, a sequence as described in U.S. Patent Application Publication No. U.S. Pat. No. 20150376240 (the content of which is incorporated herein by reference in its entirety as related to AAV capsids, insofar as it does not conflict with the present disclosure), such as, but not limited to, AAV-8h (SEQ ID NO: 6 of U.S. Pat. No. 20150376240), AAV-8b (SEQ ID NO: 5 of U.S. Pat. No. 20150376240), AAV-h (SEQ ID NO: 2 of U.S. Pat. No. 20150376240), AAV-b (SEQ ID NO: 1 of U.S. Pat. No. 20150376240), or variants thereof

[0135] In certain embodiments, the AAV serotype may be, or have, a sequence as described in U.S. Patent Application Publication No. US20160017295 (the content of which is incorporated herein by reference in its entirety as related to AAV capsids, insofar as it does not conflict with the present disclosure), such as, but not limited to, AAV SM 10-2 (SEQ ID NO: 22 of US20160017295), AAV Shuffle 100-1 (SEQ ID NO: 23 of US20160017295), AAV Shuffle 100-3 (SEQ ID NO: 24 of US20160017295), AAV Shuffle 100-7 (SEQ ID NO: 25 of US20160017295), AAV Shuffle 10-2 (SEQ ID NO: 34 of US20160017295), AAV Shuffle 10-6 (SEQ ID NO: 35 of US20160017295), AAV Shuffle 10-8 (SEQ NO: 36 of US20160017295), AAV Shuffle 100-2 (SEQ ID NO: 37 of US20160017295), AAV SM 10-1 (SEQ ID NO: 38 of US20160017295), AAV SM 10-8 (SEQ ID NO: 39 of US20160017295), AAV SM 100-3 (SEQ ID NO: 40 of US20160017295), AAV SM 100-10 (SEQ ID NO: 41 of US20160017295), or variants thereof.

[0136] In certain embodiments, the AAV serotype may he, or comprise, a sequence as described in United States Patent Publication No. U.S. Pat. No. 20150238550 (the content of which is incorporated herein by reference in its entirety as related to AAV capsids, insofar as it does not conflict with the present disclosure), such as, but not limited to, BNP61 AAV (SEQ NO: 1 of U.S. Pat. No. 20150238550), BNP62 AAV (SEQ ID NO: 3 of U.S. Pat. No. 20150238550), BNP63 AAV (SEQ ID NO: 4 of U.S. Pat. No. 20150238550), or variants thereof.

[0137] In certain embodiments, the AAV serotype may be or may comprise a sequence as described in United States Patent Publication No. U.S. Pat. No. 20150315612 (the content of which is incorporated herein by reference in its entirety as related to AAV capsids, insofar as it does not conflict with the present disclosure), such as, but not limited to, AAVrh.50 (SEQ ID NO: 108 of U.S. Pat. No. 20150315612), AAVrh.43 (SEQ ID NO: 163 of U.S. Pat. No. 20150315612), AAVrh.62 (SEQ ID NO: 114 of U.S. Pat. No. 20150315612), AAVrh.48 (SEQ ID NO: 115 of U.S. Pat. No. 20150315612), AAVhu.19 (SEQ ID NO: 133 of U.S. Pat. No. 20150315612), AAVhu.11 (SEQ ID NO: 153 of U.S. Pat. No. 20150315612), AAVhu.53 (SEQ ID NO: 186 of U.S. Pat. No. 20150315612), AAV4-8/rh.64 (SEQ ID No: 15 of U.S. Pat. No. 20150315612)-AAVLG-9/hu.39 (SEQ ID No: 24 of U.S. Pat. No. 20150315612), AAV54.5/hu.23 (SEQ ID No: 60 of U.S. Pat. No. 20150315612), AAV54.2/1m.22 (SEQ ID No: 67 of U.S. Pat. No. 20150315612), AAV54.7/1ru.24 (SEQ ID No: 66 of U.S. Pat. No. 20150315612), AAV54.1/hu.21 (SEQ ID No: 65 of U.S. Pat. No. 20150315612), AAV54.4R/hu.27 (SEQ ID No: 64 of U.S. Pat. No. 20150315612), AAV46.2/hu.28 (SEQ ID No: 68 of U.S. Pat. No. 20150315612), AAV46.6/hu.29 (SEQ ID No: 69 of U.S. Pat. No. 20150315612), AAV128.1./hu.43 (SEQ ID No: 80 of U.S. Pat. No. 20150315612), or variants thereof.

[0138] In certain embodiments, the AAV serotype may be, or comprise, a sequence as described in International Publication No. WO2015121501 (the content of which is incorporated herein by reference in its entirety as related to AAV capsids, insofar as it does not conflict with the present disclosure), such as, but not limited to, true type AAV (ttAAV) (SEQ ID NO: 2 of WO2015121501), “UPenn AAV10” (SEQ ID NO: 8 of WO2015121501) “Japanese AAV10” (SEQ ID NO: 9 of WO2015121501), or variants thereof

[0139] According to the present disclosure, AAV capsid serotype selection or use may be from a variety of species. In certain embodiments, the AAV may be an avian AAV (AAAV). The AAAV serotype may be, or have, a sequence as described in U.S. Pat. No. 9,238,800 (the content of which is incorporated herein by reference in its entirety as related to AAV capsids, insofar as it does not conflict with the present disclosure), such as, but not limited to, AAAV (SEQ ID NO: 1, 2, 4, 6, 8, 10, 12, or 14 of U.S. Pat. No. 9,238,800), or variants thereof.

[0140] In certain embodiments, the AAV may be a bovine AAV (BAAV). The BAAV serotype may be, or have, a sequence as described in U.S. Pat. No. 9,193,769 (the content of which is incorporated herein by reference in its entirety as related to AAV capsids, insofar as it does not conflict with the present disclosure), such as, but not limited to. BAAV (SEQ ID NO: 1 and 6 of U.S. Pat. No. 9,193,769), or variants thereof. The BAAV serotype may be or have a sequence as described in U.S. Pat. No. 7,427,396 (the content of which is incorporated herein by reference in its entirety as related to AAV capsids, insofar as it does not conflict with the present disclosure), such as, but not limited to, BAAV (SEQ ID NO: 5 and 6 of U.S. Pat. No. 7,427,396), or variants thereof.

[0141] In certain embodiments, the AAV may be a caprine AAV. The caprine AAV serotype may be, or have, a sequence as described in U.S. Pat. No. 7,427,396 (the content of which is incorporated herein by reference in its entirety as related to AAV capsids, insofar as it does not conflict with the present disclosure), such as, but not limited to, caprine AAV (SEQ ID NO: 3 of U.S. Pat. No. 7,427,396), or variants thereof.

[0142] In certain embodiments, the AAV may be engineered as a hybrid AAV from two or more parental serotypes. In certain embodiments, the AAV may be AAV2G9 which comprises sequences from AAV2 and AA.V9. The AAV2G9 AAV serotype may be, or have, a sequence as described in U.S. Patent Application Publication No. US20160017005 (the content of which is incorporated herein by reference in its entirety as related to AAV capsids, insofar as it does not conflict with the present disclosure).

[0143] In certain embodiments, the AAV may be a serotype generated by the AAV9 capsid library with mutations in amino acids 390-627 (VP1 numbering) as described by Pulicheda et al. (Molecular Therapy 19(6):1070-1078 (2011) (the content of which is incorporated herein by reference in its entirety as related to AAV capsids, insofar as it does not conflict with the present disclosure). The serotype and corresponding nucleotide and amino acid substitutions may be, but is not limited to, AAV9.1 (G-1594C; D53214), AAV6.2 (T1418A and 71436X; V473D and 1479K), AAV9.3 (T1238A; F413Y), AAV9.4 (11250C and A16177; F417S), AAV9.5 (A1235G, A1314T, A1642G, C1760T; Q412R, T548A, A587V), AAV9.6 (T1231A; F411I), AAV9.9 (G1203A, G1785T; W595C), AAV9.10 (A1500G, T1676C; M559T), AAV9.11 (A14251, A1702C, A17691; 1568P, Q590L), AAV9.13 (A1369C, A1720T; N457H, T574S), AAV9.14 (T1.340A, T1362C, T1560C, G1713A; L447H), AAV9.16 (A1775T; Q592L), AAV9.24 (T1507C, T1521G; W503R), AAV9.26 (A1337G, A1769C; Y446C, Q590P), AAV9.33 (A1667C; D556A), AAV9.34 (A1534G, C1794T; N512D), AAV9.35 (A1289T, T1450A, C1494T, A1515T, C1794A, G1816A; Q430L, Y484N, N98K, V606I), AAV9.40 (A1694T, E565V), AAV9.41 (A1348T, T1362C; T450S), AAV9.44 (A1684C, A1701T, A1737G; N562H, K567N), AAV9.45 (A1492T, C1804T; N498Y, L602F), AAV9.46 (G1441C, T1525C, T1549G; G481R, W509R, L517V), 9.47 (G1241A, G1358A, A1669G, C1745T; S414N, G453D, K557E, T582I), AAV9.48 (C1445T, A1736T; P482L, Q579L), AAV9.50 (A1638T, C1683T, T1805A; Q546H, L602H), AAV9.53 (G1301A, A1405C, C1664T, G1811T; R134Q, S469R, A555V, G604V), AAV9.54 (C1531A, T1609A; L511I, L537M), AAV9.55 (T1605A; F535L), AAV9.58 (C1475T, C1579A; T492I, H527N), AAV.59 (T1336C; Y446H), AAV9.61 (A1493T; N498I), AAV9.64 (C1531A, A1617T; L511I), AAV9.65 (C1335T, T1530C, C1568A; A523D), AAV9.68 (C1510A; P504T), AAV9.80 (G1441A; G481R), AAV9.83 (C1402A, A1500T; P468T, E500D), AAV9.87 (T1464C, T1468C; S490P), AAV9.90 (A1196T; Y399F), AAV9.91 (T1316G, A1583T, C1782G, 11806C; L439R, K528I), AAV9.93 (A1273G, A1421G, A1638C, C1712T, G1732A, A1744T, A1832T; S425G, Q474R, Q546H, P571L, G578R, T582S, D611V), AAV9.94 (A1675T; M559L), or AAV9.95 (T1605A; F535L).

[0144] In certain embodiments, the AAV serotype nay he, or comprise, a sequence as described in International Publication No. WO2016049230 (the content of which is incorporated herein by reference in its entirety as related to AAV capsids, insofar as it does not conflict with the present disclosure), such as, but not limited to AAVF1/HSC1 (SEQ ID NO: 2 and 20 of WO2016049230)-.NAVF2/HSC2 (SEQ ID NO: 3 and 21 of WO2016049230), AAVF3/HSC3 (SEQ m NO: 5 and 22 of WO2016049230), AAVF4/HSC4 (SEQ ID NO: 6 and 23 of WO2016049230), AAVF8/HSC5 (SEQ ID NO: 11 and 25 of WO2016049230), AAVF6/HSC6 (SEQ ID NO: 7 and 24 of WO2016049230), AAVF7/HSC7 (SEQ ID NO: 8 and 27 of WO2016049230), AAVF8/HSC8 (SEQ ID NO: 9 and 28 of WO2016049230), AAVF9/HSC9 (SEQ ID NO: 10 and 29 of WO2016049230), AAVF11/HSC11 (SEQ ID NO: 4 and 26 of WO2016049230), ANVF12/HSC12 (SEQ ID NO: 12 and 30 of WO2016049230), AAVF13/HSC13 (SEQ ID NO: 14 and 31 of WO2016049230), AAVF14/HSC14 (SEQ ID NO: 15 and 32 of WO2016049230), AAVF15/HSC15 (SEQ ID NO: 16 and 33 of WO2016049230), AAVF16/HSC16 (SEQ ID NO: 17 and 34 of WO2016049230), AAVF17/HSC17 (SEQ ID NO: 13 and 35 of WO2016049230), or variants or derivatives thereof.

[0145] In certain embodiments, the AAV serotype may he, or comprise, a sequence as described in U.S. Pat. No. 8,734,809 (the content of which is incorporated herein by reference in its entirety as related to AAV capsids, insofar as it does not conflict with the present disclosure), such as, but not limited to, AAV CBr-E1 (SEQ ID NO: 13 and 87 of U.S. Pat. No. 8,734,809), AAV CBr-E2 (SEQ ID NO: 14 and 88 of U.S. Pat. No. 8,734,809), AAV CBr-E3 (SEQ ID NO: 15 and 89 of U.S. Pat. No. 8,734,809), AAV CBr-E4 (SEQ ID NO: 16 and 90 of U.S. Pat. No. 8,734,809), AAV CBr-E5 (SEQ ID NO: 17 and 91 of U.S. Pat. No. 8,734,809), AAV CBr-e5 (SEQ ID NO: 18 and 92 of U.S. Pat. No. 8,734,809), AAV CBr-E6 (SEQ ID NO: 19 and 93 of U.S. Pat. No. 8,734,809), AAV CBr-E7 (SEQ ID NO: 20 and 94 of U.S. Pat. No. 8,734,809), AAV CBr-E8 (SEQ ID NO: 21 and 95 of U.S. Pat. No. 8,734,809), AAV CLv-D1 (SEQ ID NO: 22 and 96 of U.S. Pat. No. 8,734,809), AAV CLv-D2 (SEQ ID NO: 23 and 97 of U.S. Pat. No. 8,734,809), AAV CLv-D3 (SEQ ID NO: 24 and 98 of U.S. Pat. No. 8,734,809), AAV (SEQ ID NO: 25 and 99 of U.S. Pat. No. 8,734,809), AAV CLv-D5 (SEQ ID NO: 26 and 100 of U.S. Pat. No. 8,734,809), AAV CLv-D6 (SEQ ID NO: 27 and 101 of U.S. Pat. No. 8,734,809), AAV CLv-D7 (SEQ ID NO: 28 and 102 of U.S. Pat. No. 8,734,809), AAV CLv-D8 (SEQ ID NO: 29 and 103 of U.S. Pat. No. 8,734,809), AAV CLv-E1 (SEQ ID NO: 13 and 87 of U.S. Pat. No. 8,734,809), AAV CLv-R1 (SEQ ID NO: 30 and 104 of U.S. Pat. No. 8,734,809), AAV CLv-R2 (SEQ ID NO: 31 and 105 of U.S. Pat. No. 8,734,809), AAV CLv-R3 (SEQ ID NO: 32 and 106 of U.S. Pat. No. 8,734,809), AAV CLv-R4 (SEQ ID NO: 33 and 107 of U.S. Pat. No. 8,734,809), AAV CLv-R5 (SEQ ID NO: 34 and 108 of U.S. Pat. No. 8,734,809), AAV CLv-R6 (SEQ ID NO: 35 and 109 of U.S. Pat. No. 8,734,809), AAV CLv-R7 (SEQ ID NO: 36 and 110 of U.S. Pat. No. 8,734,809), AAV CLv-R8 (SEQ ID NO: 37 and 111 of U.S. Pat. No. 8,734,809), AAV CLv-R9 (SEQ ID NO: 38 and 112 of U.S. Pat. No. 8,734,809), AAV CLg-F1 (SEQ ID NO: 39 and 113 of U.S. Pat. No. 8,734,809), AAV CLg-F2 (SEQ ID NO: 40 and 114 of U.S. Pat. No. 8,734,809), AAV CLg-F3 (SEQ ID NO: 41 and 115 of U.S. Pat. No. 8,734,809), AAV CLg-F4 (SEQ ID NO: 42 and 116 of U.S. Pat. No. 8,734,809), AAV CLg-F5 (SEQ ID NO: 43 and 117 of U.S. Pat. No. 8,734,809), AAV CLg-F6 (SEQ ID NO: 43 and 117 of U.S. Pat. No. 8,734,809), AAV CLg-F7 (SEQ ID NO: 44 and 118 of U.S. Pat. No. 8,734,809), AAV CLg-F8 (SEQ ID NO: 43 and 117 of U.S. Pat. No. 8,734,809), AAV CSp-1 (SEQ ID NO: 45 and 119 of U.S. Pat. No. 8,734,809), AAV CSp-10 (SEQ ID NO: 46 and 120 of U.S. Pat. No. 8,734,809), AAV CSp-11 (SEQ ID NO: 47 and 121 of U.S. Pat. No. 8,734,809), AAV CSp-2 (SEQ ID NO: 48 and 122 of U.S. Pat. No. 8,734,809), AAV CSp-3 (SEQ ID NO: 49 and 123 of U.S. Pat. No.8,734,809), AAV CSp-4 (SEQ ID NO: 50 and 124 of U.S. Pat. No. 8,734,809), AAV CSp-6 (SEQ ID NO: 51 and 125 of U.S. Pat. No. 8,734,809), AAV CSp-7 (SEQ ID NO: 52 and 126 of U.S. Pat. No. 8,734,809), AAV CSp-8 (SEQ ID NO: 53 and 127 of U.S. Pat. No. 8,734,809), AAV CSp-9 (SEQ NO: 54 and 128 of U.S. Pat. No. 8,734,809), AAV CHt-2 (SEQ ID NO: 55 and 129 of U.S. Pat. No. 8,734,809), AAV CHt-3 (SEQ ID NO: 56 and 130 of U.S. Pat. No. 8,734,809), AAV CKd-1 (SEQ ID NO: 57 and 131 of U.S. Pat. No. 8,734,809), AAV CKd-10 (SEQ ID NO: 58 and 132 of U.S. Pat. No. 8,734,809), AAV CKd-2 (SEQ ID NO: 59 and 133 of U.S. Pat. No. 8,734,809), AAV CKd-3 (SEQ ID NO: 60 and 134 of U.S. Pat. No. 8,734,809), AAV CKd-4 (SEQ ID NO: 61 and 135 of U.S. Pat. No. 8,734,809), AAV CKd-6 (SEQ ID NO: 62 and 136 of U.S. Pat. No. 8,734,809), AAV CKd-7 (SEQ ID NO: 63 and 137 of U.S. Pat. No. 8,734,809), AAV CKd-8 (SEQ ID NO: 64 and 138 of U.S. Pat. No. 8,734,809), AAV CLv-1 (SEQ ID NO: 35 and 139 of U.S. Pat. No. 8,734,809), AAV CLv-12 (SEQ ID NO: 66 and 140 of U.S. Pat. No. 8,734,809), AAV CLv-13 (SEQ ID NO: 67 and 141 of U.S. Pat. No. 8,734,809), AAV CLv-2 (SEQ ID NO: 68 and 142 of U.S. Pat. No. 8,734,809), AAV CLv-3 (SEQ ID NO: 69 and 143 of U.S. Pat. No. 8,734,809), AAV CLv-4 (SEQ NO: 70 and 144 of U.S. Pat. No. 8,734,809), AAV CLv-6 (SEQ ID NO: 71 and 145 of U.S. Pat. No. 8,734,809), AAV CLv-8 (SEQ ID NO: 72 and 146 of U.S. Pat. No. 8,734,809), AAV CKd-B1 (SEQ ID NO: 73 and 147 of U.S. Pat. No. 8,734,809), AAV CKd-B2 (SEQ ID NO: 74 and 148 of U.S. Pat. No. 8,734,809), AAV CKd-B3 (SEQ ID NO: 75 and 149 of U.S. Pat. No. 8,734,809), AAV CKd-B4 (SEQ ID NO: 76 and 150 of U.S. Pat. No. 8,734,809), AAV CKd-B5 (SEQ ID NO: 77 and 151 of U.S. Pat. No. 8,734,809), AAV CKd-B6 (SEQ ID NO: 78 and 152 of U.S. Pat. No. 8,734,809), AAV CKd-B7 (SEQ ID NO: 79 and 153 of U.S. Pat. No. 8,734,809), AAV CKd-B8 (SEQ ID NO: 80 and 154 of U.S. Pat. No. 8,734,809), AAV CKd-H1 (SEQ ID NO: 81 and 155 of U.S. Pat. No. 8,734,809). AAV CKd-H2 (SEQ ID NO: 82 and 156 of U.S. Pat. No. 8,734,809), AAV CKd-H3 (SEQ ID NO: 83 and 157 of U.S. Pat. No. 8,734,809), AAV CKd-H4 (SEQ ID NO: 84 and 158 of U.S. Pat. No. 8,734,809), AAV CKd-HS (SEQ ID NO: 85 and 159 of U.S. Pat. No. 8,734,809), AAV CKd-H6 (SEQ ID NO: 77 and 151 of U.S. Pat. No. 8,734,809), AAV CHt-1 (SEQ ID NO: 86 and 160 of U.S. Pat. No. 8,734,809), AAV CLv1-1 (SEQ ID NO: 171 of U.S. Pat. No. 8,734,809), AAV CLv1-2 (SEQ ID NO: 172 of U.S. Pat. No. 8,734,809), AAV CLv1-3 (SEQ ID NO: 173 of U.S. Pat. No. 8,734,809), AAV CLv1-4 (SEQ ID NO: 174 of U.S. Pat. No. 8,734,809), AAV Clv1-7 (SEQ ID NO: 175 of U.S. Pat. No. 8,734,809), AAV Clv1-8 (SEQ ID NO: 176 of U.S. Pat. No. 8,734,809), AAV Clv1-9 (SEQ ID NO: 177 of U.S. Pat. No. 8,734,809), AAV Clv1-10 (SEQ ID NO: 178 of U.S. Pat. No. 8,734,809), AAV.VR-355 (SEQ ID NO: 181 of U.S. Pat. No. 8,734,809), AAV.hu.48R3 (SEQ ID NO: 183 of U.S. Pat. No. 8,734,809), or variants or derivatives thereof.

[0146] In certain embodiments, the AAV serotype may be, or comprise, a sequence as described in International Publication No. WO2016065001 (the content of which is incorporated herein by reference in its entirety as related to AAV capsids, insofar as it does not conflict with the present disclosure), such as, but not limited to AAV CHt-P2 (SEQ ID NO: 1 and 51 of WO2016065001), AAV CHt-P5 (SEQ ID NO: 2 and 52 of WO2016065001), AAV CHt-P9 (SEQ ID NO: 3 and 53 of WO2016065001), AAV CBr-7.1 (SEQ ID NO: 4 and 54 of WO2016065001), AAV CBr-7.2 (SEQ ID NO: 5 and 55 of WO2016065001), AAV CBr-7.3 (SEQ ID NO: 6 and 56 of WO2016065001), AAV CBr-7.4 (SEQ ID NO: 7 and 57 of WO2016065001), AAV CBr-7.5 (SEQ ID NO: 8 and 58 of WO2016065001), AAV CBr-7.7 (SEQ ID NO: 9 and 59 of WO2016065001), AAV CBr-7.8 (SEQ ID NO: 10 and 60 of WO2016065001), AAV CBr-7.10 (SEQ ID NO: 11 and 61 of WO2016065001), AAV CKd-N3 (SEQ m NO: 12 and 62 of WO2016065001), AAV CKd-N4 (SEQ ID NO: 13 and 63 of WO2016065001), AAV CKd-N9 (SEQ 1113 NO: 14 and 64 of WO2016065001), AAV CLv-L4 (SEQ ID NO: 15 and 65 of WO2016065001), AAV CLv-L5 (SEQ ID NO: 16 and 66 of WO2016065001), AAV CLv-L6 (SEQ ID NO: 17 and 67 of WO2016065001), AAV CLv-K1 (SEQ ID NO: 18 and 68 of WO2016065001), AAV CLv-K3 (SEQ ID NO: 19 and 69 of WO2016065001), AAV (SEQ ID NO: 20 and 70 of WO2016065001), AAV CLv-M1 (SEQ ID NO: 21 and 71 of WO2016065001), AAV CLv-M11 (SEQ ID NO: 22 and 72 of WO2016065001), AAV CLv-M2 (SEQ ID NO: 23 and 73 of WO2016065001), AAV CLv-M5 (SEQ ID NO: 24 and 74 of WO2016065001), AAV CLv-M6 (SEQ ID NO: 25 and 75 of WO2016065001), AAV CLv-M7 (SEQ ID NO: 26 and 76 of WO2016065001), AAV CLv-M8 (SEQ ID NO: 27 and 77 of WO2016065001), AAV CLv-M9 (SEQ ID NO: 28 and 78 of WO2016065001), AAV CHt-P1 (SEQ ID NO: 29 and 79 of WO2016065001), AAV CLv-P6 (SEQ ID NO: 30 and 80 of WO2016065001), AAV CHt-P8 (SEQ ID NO: 31 and 81 of WO2016065001), AAV CHt-6.1 (SEQ ID NO: 32 and 82 of WO2016065001), AAV CHt-6.10 (SEQ ID NO: 33 and 83 of WO2016065001), AAV CHt-6.5 (SEQ ID NO: 34 and 84 of WO2016065001), AAV CHt-6.6 (SEQ ID NO: 35 and 85 of WO2016065001), AAV CHt-6.7 (SEQ ID NO: 36 and 86 of WO2016065001), AAV CHt-6.8 (SEQ ID NO: 37 and 87 of WO2016065001), AAV CSp-8.10 (SEQ ID NO: 38 and 88 of WO2016065001), AAV CSp-8.2 (SEQ ID NO: 39 and 89 of WO2016065001), AAV CSp-8.4 (SEQ ID NO: 40 and 90 of WO2016065001), AAV CSp-8.5 (SEQ ID NO: 41 and 91 of WO2016065001), AAV CSp-8.6 (SEQ ID NO: 42 and 92 of WO2016065001)-NAV CSp-8.7 (SEQ ID NO: 43 and 93 of WO2016065001), AAV CSp-8.8 (SEQ ID NO: 44 and 94 of WO2016065001), AAV CSp-8.9 (SEQ ID NO: 45 and 95 of WO2016065001), AAV CBr-B7.3 (SEQ ID NO: 46 and 96 of WO2016065001), AAV CBr-B7.4 (SEQ ID NO: 47 and 97 of WO2016065001), AAV3B (SEQ ID NO: 48 and 98 of WO2016065001), AAV4 (SEQ NO: 49 and 99 of WO 016065001), AAV5 (SEQ ID NO: 50 and 100 of WO2016065001), or variants or derivatives thereof.

[0147] In certain embodiments, the AAV particle may be or comprise a serotype selected from any of those found in Table 1.

[0148] In certain embodiments, the AAV particle may comprise a sequence, fragment, or variant of any sequence in Table 1.

[0149] In certain embodiments, the AAV particle may be encoded by a sequence, fragment, or variant of any sequence in Table 1.

[0150] In the DNA and RNA sequences referenced and/or described herein, the single letter symbol has the following description: A for adenine; C for cytosine; G for guanine; T for thymine; U for Uracil; W for weak bases such as adenine or thymine; S for strong nucleotides such as cytosine and guanine; M for amino nucleotides such as adenine and cytosine; K for keto nucleotides such as guanine and thymine; R for purines adenine and guanine; Y for pyrimidine cytosine and thymine; B for any base that is not A (e.g., cytosine, guanine, and thymine); D for any base that is not C (e.g., adenine, guanine, and thymine); for any base that is not G (e.g., adenine, cytosine, and thymine); V for any base that is not T (e.g., adenine, cytosine, and guanine); N for any nucleotide (which is not a gap); and Z is for zero.

[0151] In any of the amino acid sequences referenced and/or described herein, the single letter symbol has the following description: G (Gly) for Glycine; A (Ala) for Alanine; L (Leu) for Leucine; M (Met) for Methionine; F (Phe) for Phenylalanine; W (Trp) for Tryptophan; K (Lys) for Lysine; Q (On) for Glutamine; E (Glu) for Glutamic Acid; S (Ser) for Serine; P (Pro) for Prolific; V (Val) for Valine; I (Ile) for Isoleucine; C (Cys) for Cysteine; Y (Tyr) for Tyrosine; H (His) for Histidine; R (Arg) for Arginine; N (Asn) for Asparagine; D (Asp) for Aspartic Acid; T (Thr) for Threonine; B (A.sx) for Aspartic acid or: sparathne; (Xle) for Leucine or Isoleucine; O (Pyl) for Pyrrolysine; U (Sec) for Selenocysteine; X (Xaa) for any amino acid; and Z (Glx) for Glutamine or Glutamic acid.

TABLE 1
Representative AAV Serotypes

| Serotype | SEQ ID NO | Reference Information |
|---|---|---|
| VOY101 | 1 or 1722 | — |
| VOY201 | 1723 or 1724 | — |
| PHP.N/PHP.B-DGT | 7 | WO2017100671 SEQ ID NO: 46 |
| AAVPHP.B or G2B-26 | 3 | WO2015038958 SEQ ID NO: 8 and 13 |
| AAVPHP.B | 4 | WO2015038958 SEQ ID NO: 9 |
| AAVG2B-13 | 5 | WO2015038958 SEQ ID NO: 12 |
| AAVTH1.1-32 | 6 | WO2015038958 SEQ ID NO: 14 |
| AAVTH1.1-35 | 7 | WO2015038958 SEQ ID NO: 15 |
| PHP.S/G2A12 | 8 | WO2017100671 SEQ ID NO: 47 |
| AAV9/hu.14 K449R | 9 | WO2017100671 SEQ ID NO: 45 |
| AAV1 | 10 | US20150159173 SEQ ID NO: 11, |
| | | US20150315612 SEQ ID NO: 202 |
| AAV1 | 11 | US20160017295 SEQ ID NO: 1, US20030138772 |
| | | SEQ ID NO: 64, US20150159173 SEQ ID NO: 27, |
| | | US20150315612 SEQ ID NO: 219, US7198951 |
| | | SEQ ID NO: 5 |
| AAV1 | 12 | US20030138772 SEQ ID NO: 6 |
| AAV1.3 | 13 | US20030138772 SEQ ID NO: 14 |
| AAV10 | 14 | US20030138772 SEQ ID NO: 117 |
| AAV10 | 15 | WO2015121501 SEQ ID NO: 9 |
| AAV10 | 16 | WO2015121501 SEQ ID NO: 8 |
| AAV11 | 17 | US20030138772 SEQ ID NO: 118 |
| AAV12 | 18 | US20030138772 SEQ ID NO: 119 |
| AAV2 | 19 | US20150159173 SEQ ID NO: 7, |
| | | US20150315612 SEQ ID NO: 211 |
| AAV2 | 20 | US20030138772 SEQ ID NO: 70, US20150159173 |
| | | SEQ ID NO: 23, US20150315612 SEQ ID NO: 221, |
| | | US20160017295 SEQ ID NO: 2, US6156303 SEQ ID |
| | | NO: 4, US7198951 SEQ ID NO: 4, WO2015121501 |
| | | SEQ ID NO: 1 |
| AAV2 | 21 | US6156303 SEQ ID NO: 8 |
| AAV2 | 22 | US20030138772 SEQ ID NO: 7 |
| AAV2 | 23 | US6156303 SEQ ID NO: 3 |
| AAV2.5T | 24 | US923313I SEQ ID NO: 42 |
| AAV223.10 | 25 | US20030138772 SEQ ID NO: 75 |
| AAV223.2 | 26 | US20030138772 SEQ ID NO: 49 |
| AAV223.2 | 27 | US20030138772 SEQ ID NO: 76 |
| AAV223.4 | 28 | US20030138772 SEQ ID NO: 50 |
| AAV223.4 | 29 | US20030138772 SEQ ID NO: 73 |
| AAV223.5 | 30 | US20030138772 SEQ ID NO: 51 |
| AAV223.5 | 31 | US20030138772 SEQ ID NO: 74 |
| AAV223.6 | 32 | US20030138772 SEQ ID NO: 52 |
| AAV223.6 | 33 | US20030138772 SEQ ID NO: 78 |
| AAV223.7 | 34 | US20030138772 SEQ ID NO: 53 |
| AAV223.7 | 35 | US20030138772 SEQ ID NO: 77 |
| AAV29.3 | 36 | US20030138772 SEQ ID NO: 82 |
| AAV29.4 | 37 | US20030138772 SEQ ID NO: 12 |
| AAV29.5 | 38 | US20030138772 SEQ ID NO: 83 |
| AAV29.5 (AAVbb.2) | 39 | US20030138772 SEQ ID NO: 13 |
| AAV3 | 40 | US20150159173 SEQ ID NO: 12 |
| AAV3 | 41 | US20030138772 SEQ ID NO: 71, US20150159173 |
| | | SEQ ID NO: 28, US20160017295 SEQ ID NO: 3, |
| | | US7198951 SEQ ID NO: 6 |
| AAV3 | 42 | US20030138772 SEQ ID NO: 8 |
| AAV3.3b | 43 | US20030138772 SEQ ID NO: 72 |
| AAV3-3 | 44 | US20150315612 SEQ ID NO: 200 |
| AAV3-3 | 45 | US20150315612 SEQ ID NO: 217 |
| AAV3a | 46 | US6156303 SEQ ID NO: 5 |
| AAV3a | 47 | US6156303 SEQ ID NO: 9 |
| AAV3b | 48 | US6156303 SEQ ID NO: 6 |
| AAV3b | 49 | US6156303 SEQ ID NO: 10 |
| AAV3b | 50 | US6156303 SEQ ID NO: 1 |
| AAV4 | 51 | US20140348794 SEQ ID NO: 17 |
| AAV4 | 52 | US20140348794 SEQ ID NO: 5 |
| AAV4 | 53 | US20140348794 SEQ ID NO: 3 |
| AAV4 | 54 | US20140348794 SEQ ID NO: 14 |
| AAV4 | 55 | US20140348794 SEQ ID NO: 15 |
| AAV4 | 56 | US20140348794 SEQ ID NO: 19 |
| AAV4 | 57 | US20140348794 SEQ ID NO: 12 |
| AAV4 | 58 | US20140348794 SEQ ID NO: 13 |
| AAV4 | 59 | US20140348794 SEQ ID NO: 7 |
| AAV4 | 60 | US20140348794 SEQ ID NO: 8 |
| AAV4 | 61 | US20140348794 SEQ ID NO: 9 |
| AAV4 | 62 | US20140348794 SEQ ID NO: 2 |
| AAV4 | 63 | US20140348794 SEQ ID NO: 10 |
| AAV4 | 64 | US20140348794 SEQ ID NO: 11 |
| AAV4 | 65 | US20140348794 SEQ ID NO: 18 |
| AAV4 | 66 | US20030138772 SEQ ID NO: 63, US20160017295 |
| | | SEQ ID NO: 4, US20140348794 SEQ ID NO: 4 |
| AAV4 | 67 | US20140348794 SEQ ID NO: 16 |
| AAV4 | 68 | US20140348794 SEQ ID NO: 20 |
| AAV4 | 69 | US20140348794 SEQ ID NO: 6 |
| AAV4 | 70 | US20140348794 SEQ ID NO: 1 |
| AAV42.2 | 71 | US20030138772 SEQ ID NO: 9 |
| AAV42.2 | 72 | US20030138772 SEQ ID NO: 102 |
| AAV42.3b | 73 | US20030138772 SEQ ID NO: 36 |
| AAV42.3B | 74 | US20030138772 SEQ ID NO: 107 |
| AAV42.4 | 75 | US20030138772 SEQ ID NO: 33 |
| AAV42.4 | 76 | US20030138772 SEQ ID NO: 88 |
| AAV42.8 | 77 | US20030138772 SEQ ID NO: 27 |
| AAV42.8 | 78 | US20030138772 SEQ ID NO: 85 |
| AAV43.1 | 79 | US20030138772 SEQ ID NO: 39 |
| AAV43.1 | 80 | US20030138772 SEQ ID NO: 92 |
| AAV43.12 | 81 | US20030138772 SEQ ID NO: 41 |
| AAV43.12 | 82 | US20030138772 SEQ ID NO: 93 |
| AAV43.20 | 83 | US20030138772 SEQ ID NO: 42 |
| AAV43.20 | 84 | US20030138772 SEQ ID NO: 99 |
| AAV43.21 | 85 | US20030138772 SEQ ID NO: 43 |
| AAV43.21 | 86 | US20030138772 SEQ ID NO: 96 |
| AAV43.23 | 87 | US20030138772 SEQ ID NO: 44 |
| AAV43.23 | 88 | US20030138772 SEQ ID NO: 98 |
| AAV43.25 | 89 | US20030138772 SEQ ID NO: 45 |
| AAV43.25 | 90 | US20030138772 SEQ ID NO: 97 |
| AAV43.5 | 91 | US20030138772 SEQ ID NO: 40 |
| AAV43.5 | 92 | US20030138772 SEQ ID NO: 94 |
| AAV4-4 | 93 | US20150315612 SEQ ID NO: 201 |
| AAV4-4 | 94 | US20150315612 SEQ ID NO: 218 |
| AAV44.1 | 95 | US20030138772 SEQ ID NO: 46 |
| AAV44.1 | 96 | US20030138772 SEQ ID NO: 79 |
| AAV44.5 | 97 | US20030138772 SEQ ID NO: 47 |
| AAV44.5 | 98 | US20030138772 SEQ ID NO: 80 |
| AAV4407 | 99 | US20150315612 SEQ ID NO: 90 |
| AAV5 | 100 | US7427396 SEQ ID NO: 1 |
| AAV5 | 101 | US20030138772 SEQ ID NO: 114 |
| AAV5 | 102 | US20160017295 SEQ ID NO: 5, US7427396 SEQ |
| | | ID NO: 2, US20150315612 SEQ ID NO: 216 |
| AAV5 | 103 | US20150315612 SEQ ID NO: 199 |
| AAV6 | 104 | US20150159173 SEQ ID NO: 13 |
| AAV6 | 105 | US20030138772 SEQ ID NO: 65, US20150159173 |
| | | SEQ ID NO: 29, US20160017295 SEQ ID NO: 6, |
| | | US6156303 SEQ ID NO: 7 |
| AAV6 | 106 | US6156303 SEQ ID NO: 11 |
| AAV6 | 107 | US6156303 SEQ ID NO: 2 |
| AAV6 | 108 | US20150315612 SEQ ID NO: 203 |
| AAV6 | 109 | US20150315612 SEQ ID NO: 220 |
| AAV6.1 | 110 | US20150159173 |
| AAV6.12 | 111 | US20150159173 |
| AAV6.2 | 112 | US20150159173 |
| AAV7 | 113 | US20150159173 SEQ ID NO: 14 |
| AAV7 | 114 | US20150315612 SEQ ID NO: 183 |
| AAV7 | 115 | US20030138772 SEQ ID NO: 2, US20150159173 |
| | | SEQ ID NO: 30, US20150315612 SEQ ID NO: 181, |
| | | US20160017295 SEQ ID NO: 7 |
| AAV7 | 116 | US20030138772 SEQ ID NO: 3 |
| AAV7 | 117 | US20030138772 SEQ ID NO: 1, US20150315612 |
| | | SEQ ID NO: 180 |
| AAV7 | 118 | US20150315612 SEQ ID NO: 213 |
| AAV7 | 119 | US20150315612 SEQ ID NO: 222 |
| AAV8 | 120 | US20150159173 SEQ ID NO: 15 |
| AAV8 | 121 | US20150376240 SEQ ID NO: 7 |
| AAV8 | 122 | US20030138772 SEQ ID NO: 4, US20150315612 |
| | | SEQ ID NO: 182 |
| AAV8 | 123 | US20030138772 SEQ ID NO: 95, US20140359799 SEQ |
| | | ID NO: 1, US20150159173 SEQ ID NO: 31, |
| | | US20160017295 SEQ ID NO: 8, US7198951 SEQ ID |
| | | NO: 7, US20150315612 SEQ ID NO: 223 |
| AAV8 | 124 | US20150376240 SEQ ID NO: 8 |
| AAV8 | 125 | US20150315612 SEQ ID NO: 214 |
| AAV-8b | 126 | US20150376240 SEQ ID NO: 5 |
| AAV-8b | 127 | US20150376240 SEQ ID NO: 3 |
| AAV-8h | 128 | US20150376240 SEQ ID NO: 6 |
| AAV-8h | 129 | US20150376240 SEQ ID NO: 4 |
| AAV9 | 130 | US20030138772 SEQ ID NO: 5 |
| AAV9 | 131 | US7198951 SEQ ID NO: 1 |
| AAV9 | 132 | US20160017295 SEQ ID NO: 9 |
| AAV9 | 133 | US20030138772 SEQ ID NO: 100, US7198951 |
| | | SEQ ID NO: 2 |
| AAV9 | 134 | US7198951 SEQ ID NO: 3 |
| AAV9 (AAVhu.14) | 135 | US7906111 SEQ ID NO: 3; WO2015038958 |
| | | SEQ ID NO: 11 |
| AAV9 (AAVhu.14) | 136 | US7906111 SEQ ID NO: 123; WO2015038958 |
| | | SEQ ID NO: 2 |
| AAVA3.1 | 137 | US20030138772 SEQ ID NO: 120 |
| AAVA3.3 | 138 | US20030138772 SEQ ID NO: 57 |
| AAVA3.3 | 139 | US20030138772 SEQ ID NO: 66 |
| AAVA3.4 | 140 | US20030138772 SEQ ID NO: 54 |
| AAVA3.4 | 141 | US20030138772 SEQ ID NO: 68 |
| AAVA3.5 | 142 | US20030138772 SEQ ID NO: 55 |
| AAVA3.5 | 143 | US20030138772 SEQ ID NO: 69 |
| AAVA3.7 | 144 | US20030138772 SEQ ID NO: 56 |
| AAVA3.7 | 145 | US20030138772 SEQ ID NO: 67 |
| AAV29.3 (AAVbb.1) | 146 | US20030138772 SEQ ID NO: 11 |
| AAVC2 | 147 | US20030138772 SEQ ID NO: 61 |
| AAVCh.5 | 148 | US20150159173 SEQ ID NO: 46, US20150315612 |
| | | SEQ ID NO: 234 |
| AAVcy.2 (AAV13.3) | 149 | US20030138772 SEQ ID NO: 15 |
| AAV24.1 | 150 | US20030138772 SEQ ID NO: 101 |
| AAVcy.3 (AAV24.1) | 151 | US20030138772 SEQ ID NO: 16 |
| AAV27.3 | 152 | US20030138772 SEQ ID NO: 104 |
| AAVcy.4 (AAV27.3) | 153 | US20030138772 SEQ ID NO: 17 |
| AAVcy.5 | 154 | US20150315612 SEQ ID NO: 227 |
| AAV7.2 | 155 | US20030138772 SEQ ID NO: 103 |
| AAVcy.5 (AAV7.2) | 156 | US20030138772 SEQ ID NO: 18 |
| AAV16.3 | 157 | US20030138772 SEQ ID NO: 105 |
| AAVcy.6 (AAV16.3) | 158 | US20030138772 SEQ ID NO: 10 |
| AAVcy.5 | 159 | US20150159173 SEQ ID NO: 8 |
| AAVcy.5 | 160 | US20150159173 SEQ ID NO: 24 |
| AAVCy.5R1 | 161 | US20150159173 |
| AAVCy.5R2 | 162 | US20150159173 |
| AAVCy.5R3 | 163 | US20150159173 |
| AAVCy.5R4 | 164 | US20150159173 |
| AAVDJ | 165 | US20140359799 SEQ ID NO: 3, US7588772 |
| | | SEQ ID NO: 2 |
| AAVDJ | 166 | US20140359799 SEQ ID NO: 2, US7588772 |
| | | SEQ ID NO: 1 |
| AAVDJ-8 | 167 | US7588772; Grimm et al 2008 |
| AAVDJ-8 | 168 | US7588772, Grimm et at 2008 |
| AAVF5 | 169 | US20030138772 SEQ ID NO: 110 |
| AAVH2 | 170 | US20030138772 SEQ ID NO: 26 |
| AAVH6 | 171 | US20030138772 SEQ ID NO: 25 |
| AAVhE1.1 | 172 | US9233131 SEQ ID NO: 44 |
| AAVhEr1.14 | 173 | US9233131 SEQ ID NO: 46 |
| AAVhEr1.16 | 174 | US9233131 SEQ ID NO: 48 |
| AAVhEr1.18 | 175 | US9233131 SEQ ID NO: 49 |
| AAVhEr1.23 (AAVhEr2.29) | 176 | US9233131 SEQ ID NO: 53 |
| AAVhEr1.35 | 177 | US9233131 SEQ ID NO: 50 |
| AAVhEr1.36 | 178 | US9233131 SEQ ID NO: 52 |
| AAVhEr1.5 | 179 | US9233131 SEQ ID NO: 45 |
| AAVhEr1.7 | 180 | US9233131 SEQ ID NO: 51 |
| AAVhEr1.8 | 181 | US9233131 SEQ ID NO: 47 |
| AAVhEr2.16 | 182 | US9233131 SEQ ID NO: 55 |
| AAVhEr2.30 | 183 | US9233131 SEQ ID NO: 56 |
| AAVhEr2.31 | 184 | US9233131 SEQ ID NO: 58 |
| AAVhEr2.36 | 185 | US9233131 SEQ ID NO: 57 |
| AAVhEr2.4 | 186 | US9233131 SEQ ID NO: 54 |
| AAVhEr3.1 | 187 | US9233131 SEQ ID NO: 59 |
| AAVhu.1 | 188 | US20150315612 SEQ ID NO: 46 |
| AAVhu.1 | 189 | US20150315612 SEQ ID NO: 144 |
| AAVhu.10 (AAV16.8) | 190 | US20150315612 SEQ ID NO: 56 |
| AAVhu.10 (AAV16.8) | 191 | US20150315612 SEQ ID NO: 156 |
| AAVhu.11 (AAV16.12) | 192 | US20150315612 SEQ ID NO: 57 |
| AAVhu.11 (AAV16.12) | 193 | US20150315612 SEQ ID NO: 153 |
| AAVhu.12 | 194 | US20150315612 SEQ ID NO: 59 |
| AAVhu.12 | 195 | US20150315612 SEQ ID NO: 154 |
| AAVhu.13 | 196 | US20150159173 SEQ ID NO: 16, US20150315612 |
| | | SEQ ID NO: 71 |
| AAVhu.13 | 197 | US20150159173 SEQ ID NO: 32, US20150315612 |
| | | SEQ ID NO: 129 |
| AAVhu.136.1 | 198 | US20150315612 SEQ ID NO: 165 |
| AAVhu.140.1 | 199 | US20150315612 SEQ ID NO: 166 |
| AAVhu.140.2 | 200 | US20150315612 SEQ ID NO: 167 |
| AAVhu.145.6 | 201 | US20150315612 SEQ ID No: 178 |
| AAVhu.15 | 202 | US20150315612 SEQ ID NO: 147 |
| AAVhu.15 (AAV33.4) | 203 | US20150315612 SEQ ID NO: 50 |
| AAVhu.156.1 | 204 | US20150315612 SEQ ID No: 179 |
| AAVhu.16 | 205 | US20150315612 SEQ ID NO: 148 |
| AAVhu.16 (AAV33.8) | 206 | US20150315612 SEQ ID NO: 51 |
| AAVhu.17 | 207 | US20150315612 SEQ ID NO: 83 |
| AAVhu.17 (AA V33.12) | 208 | US20150315612 SEQ ID NO: 4 |
| AAVhu.172.1 | 209 | US20150315612 SEQ ID NO: 171 |
| AAVhu.172.2 | 210 | US20150315612 SEQ ID NO: 172 |
| AAVhu.173.4 | 211 | US20150315612 SEQ ID NO: 173 |
| AAVhu.173.8 | 212 | US20150315612 SEQ ID NO: 175 |
| AAVhu.18 | 213 | US20150315612 SEQ ID NO: 52 |
| AAVhu.18 | 214 | US20150315612 SEQ ID NO: 149 |
| AAVhu.19 | 215 | US20150315612 SEQ ID NO: 62 |
| AAVhu.19 | 216 | US20150315612 SEQ ID NO: 133 |
| AAVhu.2 | 217 | US20150315612 SEQ ID NO: 48 |
| AAVhu.2 | 218 | US20150315612 SEQ ID NO: 143 |
| AAVhu.20 | 219 | US20150315612 SEQ ID NO: 63 |
| AAVhu.20 | 220 | US20150315612 SEQ ID NO: 134 |
| AAVhu.21 | 221 | US20150315612 SEQ ID NO: 65 |
| AAVhu.21 | 222 | US20150315612 SEQ ID NO: 135 |
| AAVhu.22 | 223 | US20150315612 SEQ ID NO: 67 |
| AAVhu.22 | 224 | US20150315612 SEQ ID NO: 138 |
| AAVhu.23 | 225 | US20150315612 SEQ ID NO: 60 |
| AAVhu.23.2 | 226 | US20150315612 SEQ ID NO: 137 |
| AAVhu.24 | 227 | US20150315612 SEQ ID NO: 66 |
| AAVhu.24 | 228 | US20150315612 SEQ ID NO: 136 |
| AAVhu.25 | 229 | US20150315612 SEQ ID NO: 49 |
| AAVhu.25 | 230 | US20150315612 SEQ ID NO: 146 |
| AAVhu.26 | 231 | US20150159173 SEQ ID NO: 17, US20150315612 |
| | | SEQ ID NO: 61 |
| AAVhu.26 | 232 | US20150159173 SEQ ID NO: 33, US20150315612 |
| | | SEQ ID NO: 139 |
| AAVhu.27 | 233 | US20150315612 SEQ ID NO: 64 |
| AAVhu.27 | 234 | US20150315612 SEQ ID NO: 140 |
| AAVhu.28 | 235 | US20150315612 SEQ ID NO: 68 |
| AAVhu.28 | 236 | US20150315612 SEQ ID NO: 130 |
| AAVhu.29 | 237 | US20150315612 SEQ ID NO: 69 |
| AAVhu.29 | 238 | US20150159173 SEQ ID NO: 42, US20150315612 |
| | | SEQ ID NO: 132 |
| AAVhu.29 | 239 | US20150315612 SEQ ID NO: 225 |
| AAVhu.29R | 240 | US20150159173 |
| AAVhu.3 | 241 | US20150315612 SEQ ID NO: 44 |
| AAVhu.3 | 242 | US20150315612 SEQ ID NO: 145 |
| AAVhu.30 | 243 | US20150315612 SEQ ID NO: 70 |
| AAVhu.30 | 244 | US20150315612 SEQ ID NO: 131 |
| AAVhu.31 | 245 | US20150315612 SEQ ID NO: 1 |
| AAVhu.31 | 246 | US20150315612 SEQ ID NO: 121 |
| AAVhu.32 | 247 | US20150315612 SEQ ID NO: 2 |
| AAVhu.32 | 248 | US20150315612 SEQ ID NO: 122 |
| AAVhu.33 | 249 | US20150315612 SEQ ID NO: 75 |
| AAVhu.33 | 250 | US20150315612 SEQ ID NO: 124 |
| AAVhu.34 | 251 | US20150315612 SEQ ID NO: 72 |
| AAVhu.34 | 252 | US20150315612 SEQ ID NO: 125 |
| AAVhu.35 | 253 | US20150315612 SEQ ID NO: 73 |
| AAVhu.35 | 254 | US20150315612 SEQ ID NO: 164 |
| AAVhu.36 | 255 | US20150315612 SEQ ID NO: 74 |
| AAVhu.36 | 256 | US20150315612 SEQ ID NO: 126 |
| AAVhu.37 | 257 | US20150159173 SEQ ID NO: 34, US20150315612 |
| | | SEQ ID NO: 88 |
| AAVhu.37 (AAV106.1) | 258 | US20150315612 SEQ ID NO: 10, US20150159173 |
| | | SEQ ID NO: 18 |
| AAVhu.38 | 259 | US20150315612 SEQ ID NO: 161 |
| AAVhu.39 | 260 | US20150315612 SEQ ID NO: 102 |
| AAVhu.39 (AAVLG-9) | 261 | US20150315612 SEQ ID NO: 24 |
| AAVhu.4 | 262 | US20150315612 SEQ ID NO: 47 |
| AAVhu.4 | 263 | US20150315612 SEQ ID NO: 141 |
| AAVhu.40 | 264 | US20150315612 SEQ ID NO: 87 |
| AAVhu.40 (AAV114.3) | 265 | US20150315612 SEQ ID No: 11 |
| AAVhu.41 | 266 | US20150315612 SEQ ID NO: 91 |
| AAVhu.41 (AAV127.2) | 267 | US20150315612 SEQ ID NO: 6 |
| AAVhu.42 | 268 | US20150315612 SEQ ID NO: 85 |
| AAVhu.42 (AAV127.5) | 269 | US20150315612 SEQ ID NO: 8 |
| AAVhu.43 | 270 | US20150315612 SEQ ID NO: 160 |
| AAVhu.43 | 271 | US20150315612 SEQ ID NO: 236 |
| AAVhu.43 (AAV128.1) | 272 | US20150315612 SEQ ID NO: 80 |
| AAVhu.44 | 273 | US20150159173 SEQ ID NO: 45, US20150315612 |
| | | SEQ ID NO: 158 |
| AAVhu.44 (AAV128.3) | 274 | US20150315612 SEQ ID NO: 81 |
| AAVhu.44R1 | 275 | US20150159173 |
| AAVhu.44R2 | 276 | US20150159173 |
| AAVhu.44R3 | 277 | US20150159173 |
| AAVhu.45 | 278 | US20150315612 SEQ ID NO: 76 |
| AAVhu.45 | 279 | US20150315612 SEQ ID NO: 127 |
| AAVhu.46 | 280 | US20150315612 SEQ ID NO: 82 |
| AAVhu.46 | 281 | US20150315612 SEQ ID NO: 159 |
| AAVhu.46 | 282 | US20150315612 SEQ ID NO: 224 |
| AAVhu.47 | 283 | US20150315612 SEQ ID NO: 77 |
| AAVhu.47 | 284 | US20150315612 SEQ ID NO: 128 |
| AAVhu.48 | 285 | US20150159173 SEQ ID NO: 38 |
| AAVhu.48 | 286 | US20150315612 SEQ ID NO: 157 |
| AAVhu.48 (AAV130.4) | 287 | US20150315612 SEQ ID NO: 78 |
| AAVhu.48R1 | 288 | US20150159173 |
| AAVhu.48R2 | 289 | US20150159173 |
| AAVhu.48R3 | 290 | US20150159173 |
| AAVhu.49 | 291 | US20150315612 SEQ ID NO: 209 |
| AAVhu.49 | 292 | US20150315612 SEQ ID NO: 189 |
| AAVhu.5 | 293 | US20150315612 SEQ ID NO: 45 |
| AAVhu.5 | 294 | US20150315612 SEQ ID NO: 142 |
| AAVhu.51 | 295 | US20150315612 SEQ ID NO: 208 |
| AAVhu.51 | 296 | US20150315612 SEQ ID NO: 190 |
| AAVhu.52 | 297 | US20150315612 SEQ ID NO: 210 |
| AAVhu.52 | 298 | US20150315612 SEQ ID NO: 191 |
| AAVhu.53 | 299 | US20150159173 SEQ ID NO: 19 |
| AAVhu.53 | 300 | US20150159173 SEQ ID NO: 35 |
| AAVhu.53 (AAV145.1) | 301 | US20150315612 SEQ ID NO: 176 |
| AAVhu.54 | 302 | US20150315612 SEQ ID NO: 188 |
| AAVhu.54 (AAV145.5) | 303 | US20150315612 SEQ ID No: 177 |
| AAVhu.55 | 304 | US20150315612 SEQ ID NO: 187 |
| AAVhu.56 | 305 | US20150315612 SEQ ID NO: 205 |
| AAVhu.56 (AAV145.6) | 306 | US20150315612 SEQ ID NO: 168 |
| AAVhu.56 (AAV145.6) | 307 | US20150315612 SEQ ID NO: 192 |
| AAVhu.57 | 308 | US20150315612 SEQ ID NO: 206 |
| AAVhu.57 | 309 | US20150315612 SEQ ID NO: 169 |
| AAVhu.57 | 310 | US20150315612 SEQ ID NO: 193 |
| AAVhu.58 | 311 | US20150315612 SEQ ID NO: 207 |
| AAVhu.58 | 312 | US20150315612 SEQ ID NO: 194 |
| AAVhu.6 (AAV3.1) | 313 | US20150315612 SEQ ID NO: 5 |
| AAVhu.6 (AAV3.1) | 314 | US20150315612 SEQ ID NO: 84 |
| AAVhu.60 | 315 | US20150315612 SEQ ID NO: 184 |
| AAVhu.60 (AAV161.10) | 316 | US20150315612 SEQ ID NO: 170 |
| AAVhu.61 | 317 | US20150315612 SEQ ID NO: 185 |
| AAVhu.61 (AAV161.6) | 318 | US20150315612 SEQ ID NO: 174 |
| AAVhu.63 | 319 | US20150315612 SEQ ID NO: 204 |
| AAVhu.63 | 320 | US20150315612 SEQ ID NO: 195 |
| AAVhu.64 | 321 | US20150315612 SEQ ID NO: 212 |
| AAVhu.64 | 322 | US20150315612 SEQ ID NO: 196 |
| AAVhu.66 | 323 | US20150315612 SEQ ID NO: 197 |
| AAVhu.67 | 324 | US20150315612 SEQ ID NO: 215 |
| AAVhu.67 | 325 | US20150315612 SEQ ID NO: 198 |
| AAVhu.7 | 326 | US20150315612 SEQ ID NO: 226 |
| AAVhu.7 | 327 | US20150315612 SEQ ID NO: 150 |
| AAVhu.7 (AAV7.3) | 328 | US20150315612 SEQ ID NO: 55 |
| AAVhu.71 | 329 | US20150315612 SEQ ID NO: 79 |
| AAVhu.8 | 330 | US20150315612 SEQ ID NO: 53 |
| AAVhu.8 | 331 | US20150315612 SEQ ID NO: 12 |
| AAVhu.8 | 332 | US20150315612 SEQ ID NO: 151 |
| AAVhu.9 (AAV3.1) | 333 | US20150315612 SEQ ID NO: 58 |
| AAVhu.9 (AAV3.1) | 334 | US20150315612 SEQ ID NO: 155 |
| AAV-LK01 | 335 | US20150376607 SEQ ID NO: 2 |
| AAV-LK01 | 336 | US20150376607 SEQ ID NO: 29 |
| AAV-LK02 | 337 | US20150376607 SEQ ID NO: 3 |
| AAV-LK02 | 338 | US20150376607 SEQ ID NO: 30 |
| AAV-LK03 | 339 | US20150376607 SEQ ID NO: 4 |
| AAV-LK03 | 340 | WO2015121501 SEQ ID NO: 12, US20150376607 |
| | | SEQ ID NO: 31 |
| AAV-LK04 | 341 | US20150376607 SEQ ID NO: 5 |
| AAV-LK04 | 342 | US20150376607 SEQ ID NO: 32 |
| AAV-LK05 | 343 | US20150376607 SEQ ID NO: 6 |
| AAV-LK05 | 344 | US20150376607 SEQ ID NO: 33 |
| AAV-LK06 | 345 | US20150376607 SEQ ID NO: 7 |
| AAV-LK06 | 346 | US20150376607 SEQ ID NO: 34 |
| AAV-LK07 | 347 | US20150376607 SEQ ID NO: 8 |
| AAV-LK07 | 348 | US20150376607 SEQ ID NO: 35 |
| AAV-LK08 | 349 | US20150376607 SEQ ID NO: 9 |
| AAV-LK08 | 350 | US20150376607 SEQ ID NO: 36 |
| AAV-LK09 | 351 | US20150376607 SEQ ID NO: 10 |
| AAV-LK09 | 352 | US20150376607 SEQ ID NO: 37 |
| AAV-LK10 | 353 | US20150376607 SEQ ID NO: 11 |
| AAV-LK10 | 354 | US20150376607 SEQ ID NO: 38 |
| AAV-LK11 | 355 | US20150376607 SEQ ID NO: 12 |
| AAV-LK11 | 356 | US20150376607 SEQ ID NO: 39 |
| AAV-LK12 | 357 | US20150376607 SEQ ID NO: 13 |
| AAV-LK12 | 358 | US20150376607 SEQ ID NO: 40 |
| AAV-LK13 | 359 | US20150376607 SEQ ID NO: 14 |
| AAV-LK13 | 360 | US20150376607 SEQ ID NO: 41 |
| AAV-LK14 | 361 | US20150376607 SEQ ID NO: 15 |
| AAV-LK14 | 362 | US20150376607 SEQ ID NO: 42 |
| AAV-LK15 | 363 | US20150376607 SEQ ID NO: 16 |
| AAV-LK15 | 364 | US20150376607 SEQ ID NO: 43 |
| AAV-LK16 | 365 | US20150376607 SEQ ID NO: 17 |
| AAV-LK16 | 366 | US20150376607 SEQ ID NO: 44 |
| AAV-LK17 | 367 | US20150376607 SEQ ID NO: 18 |
| AAV-LK17 | 368 | US20150376607 SEQ ID NO: 45 |
| AAV-LK18 | 369 | US20150376607 SEQ ID NO: 19 |
| AAV-LK18 | 370 | US20150376607 SEQ ID NO: 46 |
| AAV-LK19 | 371 | US20150376607 SEQ ID NO: 20 |
| AAV-LK19 | 372 | US20150376607 SEQ ID NO: 47 |
| AAV-PAEC | 373 | US20150376607 SEQ ID NO: 1 |
| AAV-PAEC | 374 | US20150376607 SEQ ID NO: 48 |
| AAV-PAEC11 | 375 | US20150376607 SEQ ID NO: 26 |
| AAV-PAEC11 | 376 | US20150376607 SEQ ID NO: 54 |
| AAV-PAEC12 | 377 | US20150376607 SEQ ID NO: 27 |
| AAV-PAEC12 | 378 | US20150376607 SEQ ID NO: 51 |
| AAV-PAEC13 | 379 | US20150376607 SEQ ID NO: 28 |
| AAV-PAEC13 | 380 | US20150376607 SEQ ID NO: 49 |
| AAV-PAEC2 | 381 | US20150376607 SEQ ID NO: 21 |
| AAV-PAEC2 | 382 | US20150376607 SEQ ID NO: 56 |
| AAV-PAEC4 | 383 | US20150376607 SEQ ID NO: 22 |
| AAV-PAEC4 | 384 | US20150376607 SEQ ID NO: 55 |
| AAV-PAEC6 | 385 | US20150376607 SEQ ID NO: 23 |
| AAV-PAEC6 | 386 | US20150376607 SEQ ID NO: 52 |
| AAV-PAEC7 | 387 | US20150376607 SEQ ID NO: 24 |
| AAV-PAEC7 | 388 | US20150376607 SEQ ID NO: 53 |
| AAV-PAEC8 | 389 | US20150376607 SEQ ID NO: 25 |
| AAV-PAEC8 | 390 | US20150376607 SEQ ID NO: 50 |
| AAVpi.1 | 391 | US20150315612 SEQ ID NO: 28 |
| AAVpi.1 | 392 | US20150315612 SEQ ID NO: 93 |
| AAVpi.2 | 393 | US20150315612 SEQ ID NO: 30 |
| AAVpi.2 | 394 | US20150315612 SEQ ID NO: 95 |
| AAVpi.3 | 395 | US20150315612 SEQ ID NO: 29 |
| AAVpi.3 | 396 | US20150315612 SEQ ID NO: 94 |
| AAVrh.10 | 397 | US20150159173 SEQ ID NO: 9 |
| AAVrh.10 | 398 | US20150159173 SEQ ID NO: 25 |
| AAV44.2 | 399 | US20030138772 SEQ ID NO: 59 |
| AAVrh.10 (AAV44.2) | 400 | US20030138772 SEQ ID NO: 81 |
| AAV42.1B | 401 | US20030138772 SEQ ID NO: 90 |
| AAVrh.12 (AAV42.1b) | 402 | US20030138772 SEQ ID NO: 30 |
| AAVrh.13 | 403 | US20150159173 SEQ ID NO: 10 |
| AAVrh.13 | 404 | US20150159173 SEQ ID NO: 26 |
| AAVrh.13 | 405 | US20150315612 SEQ ID NO: 228 |
| AAVrh.13R | 406 | US20150159173 |
| AAV42.3A | 407 | US20030138772 SEQ ID NO: 87 |
| AAVrh.14 (AAV42.3a) | 408 | US20030138772 SEQ ID NO: 32 |
| AAV42.5A | 409 | US20030138772 SEQ ID NO: 89 |
| AAVrh.17 (AAV42.5a) | 410 | US20030138772 SEQ ID NO: 34 |
| AAV42.5B | 411 | US20030138772 SEQ ID NO: 91 |
| AAVrh.18 (AAV42.5b) | 412 | US20030138772 SEQ ID NO: 29 |
| AAV42.6B | 413 | US20030138772 SEQ ID NO: 112 |
| AAVrh.19 (AAV42.6b) | 414 | US20030138772 SEQ ID NO: 38 |
| AAVrh.2 | 415 | US20150159173 SEQ ID NO: 39 |
| AAVrh.2 | 416 | US20150315612 SEQ ID NO: 231 |
| AAVrh.20 | 417 | US20150159173 SEQ ID NO: 1 |
| AAV42.10 | 418 | US20030138772 SEQ ID NO: 106 |
| AAVrh.21 (AAV42.10) | 419 | US20030138772 SEQ ID NO: 35 |
| AAV42.11 | 420 | US20030138772 SEQ ID NO: 108 |
| AAVrh.22 (AAV42.11) | 421 | US20030138772 SEQ ID NO: 37 |
| AAV42.12 | 422 | US20030138772 SEQ ID NO: 113 |
| AAVrh.23 (AAV42.12) | 423 | US20030138772 SEQ ID NO: 58 |
| AAV42.13 | 424 | US20030138772 SEQ ID NO: 86 |
| AAVrh.24 (AAV42.13) | 425 | US20030138772 SEQ ID NO: 31 |
| AAV42.15 | 426 | US20030138772 SEQ ID NO: 84 |
| AAVrh.25 (AAV42.15) | 427 | US20030138772 SEQ ID NO: 28 |
| AAVrh.2R | 428 | US20150159173 |
| AAVrh.31 (AAV223.1) | 429 | US20030138772 SEQ ID NO: 48 |
| AAVC1 | 430 | US20030138772 SEQ ID NO: 60 |
| AAVrh.32 (AAVC1) | 431 | US20030138772 SEQ ID NO: 19 |
| AAVrh.32/33 | 432 | US20150159173 SEQ ID NO: 2 |
| AAVrh.33 (AAVC3) | 433 | US20030138772 SEQ ID NO: 20 |
| AAVC5 | 434 | US20030138772 SEQ ID NO: 62 |
| AAVrh.34 (AAVC5) | 435 | US20030138772 SEQ ID NO: 21 |
| AAVF1 | 436 | US20030138772 SEQ ID NO: 109 |
| AAVrh.35 (AAVF1) | 437 | US20030138772 SEQ ID NO: 22 |
| AAVF3 | 438 | US20030138772 SEQ ID NO: 111 |
| AAVrh.36 (AAVF3) | 439 | US20030138772 SEQ ID NO: 23 |
| AAVrh.37 | 440 | US20030138772 SEQ ID NO: 24 |
| AAVrh.37 | 441 | US20150159173 SEQ ID NO: 40 |
| AAVrh.37 | 442 | US20150315612 SEQ ID NO: 229 |
| AAVrh.37R2 | 443 | US20150159173 |
| AAVrh.38 (AAVLG-4) | 444 | US20150315612 SEQ ID NO: 7 |
| AAVrh.38 (AAVLG-4) | 445 | US20150315612 SEQ ID NO: 86 |
| AAVrh.39 | 446 | US20150159173 SEQ ID NO: 20, US20150315612 |
| | | SEQ ID NO: 13 |
| AAVrh.39 | 447 | US20150159173 SEQ ID NO: 3, US20150159173 |
| | | SEQ ID NO: 36, US20150315612 SEQ ID NO: 89 |
| AAVrh.40 | 448 | US20150315612 SEQ ID NO: 92 |
| AAVrh.40 (AAVLG-10) | 449 | US20150315612 SEQ ID No: 14 |
| AAVrh.43 (AAVN721-8) | 450 | US20150315612 SEQ ID NO: 43, US20150159173 |
| | | SEQ ID NO: 21 |
| AAVrh.43 (AAVN721-8) | 451 | US20150315612 SEQ ID NO: 163, US20150159173 |
| | | SEQ ID NO: 37 |
| AAVrh.44 | 452 | US20150315612 SEQ ID NO: 34 |
| AAVrh.44 | 453 | US20150315612 SEQ ID NO: 111 |
| AAVrh.45 | 454 | US20150315612 SEQ ID NO: 41 |
| AAVrh.45 | 455 | US20150315612 SEQ ID NO: 109 |
| AAVrh.46 | 456 | US20150159173 SEQ ID NO: 22, US20150315612 |
| | | SEQ ID NO: 19 |
| AAVrh.46 | 457 | US20150159173 SEQ ID NO: 4, US20150315612 |
| | | SEQ ID NO: 101 |
| AAVrh.47 | 458 | US20150315612 SEQ ID NO: 38 |
| AAVrh.47 | 459 | US20150315612 SEQ ID NO: 118 |
| AAVrh.48 | 460 | US20150159173 SEQ ID NO: 44, US20150315612 |
| | | SEQ ID NO: 115 |
| AAVrh.48.1 | 461 | US20150159173 |
| AAVrh.48.1.2 | 462 | US20150159173 |
| AAVrh.48.2 | 463 | US20150159173 |
| AAVrh.48 (AAV1-7) | 464 | US20150315612 SEQ ID NO: 32 |
| AAVrh.49 (AAV1-8) | 465 | US20150315612 SEQ ID NO: 25 |
| AAVrh.49 (AAV1-8) | 466 | US20150315612 SEQ ID NO: 103 |
| AAVrh.50 (AAV2-4) | 467 | US20150315612 SEQ ID NO: 23 |
| AAVrh.50 (AAV2-4) | 468 | US20150315612 SEQ ID NO: 108 |
| AAVrh.51 (AAV2-5) | 469 | US20150315612 SEQ ID No: 22 |
| AAVrh.51 (AAV2-5) | 470 | US20150315612 SEQ ID NO: 104 |
| AAVrh.52 (AAV3-9) | 471 | US20150315612 SEQ ID NO: 18 |
| AAVrh.52 (AAV3-9) | 472 | US20150315612 SEQ ID NO: 96 |
| AAVrh.53 | 473 | US20150315612 SEQ ID NO: 97 |
| AAVrh.53 (AAV3-11) | 474 | US20150315612 SEQ ID NO: 17 |
| AAVrh.53 (AAV3-11) | 475 | US20150315612 SEQ ID NO: 186 |
| AAVrh.54 | 476 | US20150315612 SEQ ID NO: 40 |
| AAVrh.54 | 477 | US20150159173 SEQ ID NO: 49, US20150315612 |
| | | SEQ ID NO: 116 |
| AAVrh.55 | 478 | US20150315612 SEQ ID NO: 37 |
| AAVrh.55 (AAV4-19) | 479 | US20150315612 SEQ ID NO: 117 |
| AAVrh.56 | 480 | US20150315612 SEQ ID NO: 54 |
| AAVrh.56 | 481 | US20150315612 SEQ ID NO: 152 |
| AAVrh.57 | 482 | US20150315612 SEQ ID NO: 26 |
| AAVrh.57 | 483 | US20150315612 SEQ ID NO: 105 |
| AAVrh.58 | 484 | US20150315612 SEQ ID NO: 27 |
| AAVrh.58 | 485 | US20150159173 SEQ ID NO: 48, US20150315612 |
| | | SEQ ID NO: 106 |
| AAVrh.58 | 486 | US20150315612 SEQ ID NO: 232 |
| AAVrh.59 | 487 | US20150315612 SEQ ID NO: 42 |
| AAVrh.59 | 488 | US20150315612 SEQ ID NO: 110 |
| AAVrh.60 | 489 | US20150315612 SEQ ID NO: 31 |
| AAVrh.60 | 490 | US20150315612 SEQ ID NO: 120 |
| AAVrh.61 | 491 | US20150315612 SEQ ID NO: 107 |
| AAVrh.61 (AAV2-3) | 492 | US20150315612 SEQ ID NO: 21 |
| AAVrh.62 (AAV2-15) | 493 | US20150315612 SEQ ID No: 33 |
| AAVrh.62 (AAV2-15) | 494 | US20150315612 SEQ ID NO: 114 |
| AAVrh.64 | 495 | US20150315612 SEQ ID No: 15 |
| AAVrh.64 | 496 | US20150159173 SEQ ID NO: 43, US20150315612 |
| | | SEQ ID NO: 99 |
| AAVrh.64 | 497 | US20150315612 SEQ ID NO: 233 |
| AAVRh.64R1 | 498 | US20150159173 |
| AAVRh.64R2 | 499 | US20150159173 |
| AAVrh.65 | 500 | US20150315612 SEQ ID NO: 35 |
| AAVrh.65 | 501 | US20150315612 SEQ ID NO: 112 |
| AAVrh.67 | 502 | US20150315612 SEQ ID NO: 36 |
| AAVrh.67 | 503 | US20150315612 SEQ ID NO: 230 |
| AAVrh.67 | 504 | US20150159173 SEQ ID NO: 47, US20150315612 |
| | | SEQ ID NO: 113 |
| AAVrh.68 | 505 | US20150315612 SEQ ID NO: 16 |
| AAVrh.68 | 506 | US20150315612 SEQ ID NO: 100 |
| AAVrh.69 | 507 | US20150315612 SEQ ID NO: 39 |
| AAVrh.69 | 508 | US20150315612 SEQ ID NO: 119 |
| AAVrh.70 | 509 | US20150315612 SEQ ID NO: 20 |
| AAVrh.70 | 510 | US20150315612 SEQ ID NO: 98 |
| AAVrh.71 | 511 | US20150315612 SEQ ID NO: 162 |
| AAVrh.72 | 512 | US20150315612 SEQ ID NO: 9 |
| AAVrh.73 | 513 | US20150159173 SEQ ID NO: 5 |
| AAVrh.74 | 514 | US20150159173 SEQ ID NO: 6 |
| AAVrh.8 | 515 | US20150159173 SEQ ID NO: 41 |
| AAVrh.8 | 516 | US20150315612 SEQ ID NO: 235 |
| AAVrh.8R | 517 | US20150159173, WO2015168666 SEQ ID NO: 9 |
| AAVrh.8R A586R mutant | 518 | WO2015168666 SEQ ID NO: 10 |
| AAVrh.8R R533A mutant | 519 | WO2015168666 SEQ ID NO: 11 |
| BAAV (bovine AAV) | 520 | US9193769 SEQ ID NO: 8 |
| BAAV (bovine AAV) | 521 | US9193769 SEQ ID NO: 10 |
| BAAV (bovine AAV) | 522 | US9193769 SEQ ID NO: 4 |
| BAAV (bovine AAV) | 523 | US9193769 SEQ ID NO: 2 |
| BAAV (bovine AAV) | 524 | US9193769 SEQ ID NO: 6 |
| BAAV (bovine AAV) | 525 | US9193769 SEQ ID NO: 1 |
| BAAV (bovine AAV) | 526 | US9193769 SEQ ID NO: 5 |
| BAAV (bovine AAV) | 527 | US9193769 SEQ ID NO: 3 |
| BAAV (bovine AAV) | 528 | US9193769 SEQ ID NO: 11 |
| BAAV (bovine AAV) | 529 | US7427396 SEQ ID NO: 5 |
| BAAV (bovine AAV) | 530 | US7427396 SEQ ID NO: 6 |
| BAAV (bovine AAV) | 531 | US9193769 SEQ ID NO: 7 |
| BAAV (bovine AAV) | 532 | US9193769 SEQ ID NO: 9 |
| BNP61 AAV | 533 | US20150238550 SEQ ID NO: 1 |
| BNP61 AAV | 534 | US20150238550 SEQ ID NO: 2 |
| BNP62 AAV | 535 | US20150238550 SEQ ID NO: 3 |
| BNP63 AAV | 536 | US20150238550 SEQ ID NO: 4 |
| caprine AAV | 537 | US7427396 SEQ ID NO: 3 |
| caprine AAV | 538 | US7427396 SEQ ID NO: 4 |
| true type AAV (ttAAV) | 539 | WO2015121501 SEQ ID NO: 2 |
| AAAV (Avian AAV) | 540 | US9238800 SEQ ID NO: 12 |
| AAAV (Avian AAV) | 541 | US9238800 SEQ ID NO: 2 |
| AAAV (Avian AAV) | 542 | US9238800 SEQ ID NO: 6 |
| AAAV (Avian AAV) | 543 | US9238800 SEQ ID NO: 4 |
| AAAV (Avian AAV) | 544 | US9238800 SEQ ID NO: 8 |
| AAAV (Avian AAV) | 545 | US9238800 SEQ ID NO: 14 |
| AAAV (Avian AAV) | 546 | US9238800 SEQ ID NO: 10 |
| AAAV (Avian AAV) | 547 | US9238800 SEQ ID NO: 15 |
| AAAV (Avian AAV) | 548 | US9238800 SEQ ID NO: 5 |
| AAAV (Avian AAV) | 549 | US9238800 SEQ ID NO: 9 |
| AAAV (Avian AAV) | 550 | US9238800 SEQ ID NO: 3 |
| AAAV (Avian AAV) | 551 | US9238800 SEQ ID NO: 7 |
| AAAV (Avian AAV) | 552 | US9238800 SEQ ID NO: 11 |
| AAAV (Avian AAV) | 553 | US9238800 SEQ ID NO: 13 |
| AAAV (Avian AAV) | 554 | US9238800 SEQ ID NO: 1 |
| AAV Shuffle 100-1 | 555 | US20160017295 SEQ ID NO: 23 |
| AAV Shuffle 100-1 | 556 | US20160017295 SEQ ID NO: 11 |
| AAV Shuffle 100-2 | 557 | US20160017295 SEQ ID NO: 37 |
| AAV Shuffle 100-2 | 558 | US20160017295 SEQ ID NO: 29 |
| AAV Shuffle 100-3 | 559 | US20160017295 SEQ ID NO: 24 |
| AAV Shuffle 100-3 | 560 | US20160017295 SEQ ID NO: 12 |
| AAV Shuffle 100-7 | 561 | US20160017295 SEQ ID NO: 25 |
| AAV Shuffle 100-7 | 562 | US20160017295 SEQ ID NO: 13 |
| AAV Shuffle 10-2 | 563 | US20160017295 SEQ ID NO: 34 |
| AAV Shuffle 10-2 | 564 | US20160017295 SEQ ID NO: 26 |
| AAV Shuffle 10-6 | 565 | US20160017295 SEQ ID NO: 35 |
| AAV Shuffle 10-6 | 566 | US20160017295 SEQ ID NO: 27 |
| AAV Shuffle 10-8 | 567 | US20160017295 SEQ ID NO: 36 |
| AAV Shuffle 10-8 | 568 | US20160017295 SEQ ID NO: 28 |
| AAV SM 100-10 | 569 | US20160017295 SEQ ID NO: 41 |
| AAV SM 100-10 | 570 | US20160017295 SEQ ID NO: 33 |
| AAV SM 100-3 | 571 | US20160017295 SEQ ID NO: 40 |
| AAV SM 100-3 | 572 | US20160017295 SEQ ID NO: 32 |
| AAV SM 10-1 | 573 | US20160017295 SEQ ID NO: 38 |
| AAV SM 10-1 | 574 | US20160017295 SEQ ID NO: 30 |
| AAV SM 10-2 | 575 | US20160017295 SEQ ID NO: 10 |
| AAV SM 10-2 | 576 | US20160017295 SEQ ID NO: 22 |
| AAV SM 10-8 | 577 | US20160017295 SEQ ID NO: 39 |
| AAV SM 10-8 | 578 | US20160017295 SEQ ID NO: 31 |
| AAVF1/HSC1 | 579 | WO2016049230 SEQ ID NO: 20 |
| AAVF2/HSC2 | 580 | WO2016049230 SEQ ID NO: 21 |
| AAVF3/HSC3 | 581 | WO2016049230 SEQ ID NO: 22 |
| AAVF4/HSC4 | 582 | WO2016049230 SEQ ID NO: 23 |
| AAVF5/HSC5 | 583 | WO2016049230 SEQ ID NO: 25 |
| AAVF6/HSC6 | 584 | WO2016049230 SEQ ID NO: 24 |
| AAVF7/HSC7 | 585 | WO2016049230 SEQ ID NO: 27 |
| AAVF8/HSC8 | 586 | WO2016049230 SEQ ID NO: 28 |
| AAVF9/HSC9 | 587 | WO2016049230 SEQ ID NO: 29 |
| AAVF11/HSC11 | 588 | WO2016049230 SEQ ID NO: 26 |
| AAVF12/HSC12 | 589 | WO2016049230 SEQ ID NO: 30 |
| AAVF13/HSC13 | 590 | WO2016049230 SEQ ID NO: 31 |
| AAVF14/HSC14 | 591 | WO2016049230 SEQ ID NO: 32 |
| AAVF15/HSC15 | 592 | WO2016049230 SEQ ID NO: 33 |
| AAVF16/HSC16 | 593 | WO2016049230 SEQ ID NO: 34 |
| AAVF17/HSC17 | 594 | WO2016049230 SEQ ID NO: 35 |
| AAVF1/HSC1 | 595 | WO2016049230 SEQ ID NO: 2 |
| AAVF2/HSC2 | 596 | WO2016049230 SEQ ID NO: 3 |
| AAVF3/HSC3 | 597 | WO2016049230 SEQ ID NO: 5 |
| AAVF4/HSC4 | 598 | WO2016049230 SEQ ID NO: 6 |
| AAVF5/HSC5 | 599 | WO2016049230 SEQ ID NO: 11 |
| AAVF6/HSC6 | 600 | WO2016049230 SEQ ID NO: 7 |
| AAVF7/HSC7 | 601 | WO2016049230 SEQ ID NO: 8 |
| AAVF8/HSC8 | 602 | WO2016049230 SEQ ID NO: 9 |
| AAVF9/HSC9 | 603 | WO2016049230 SEQ ID NO: 10 |
| AAVF11/HSC11 | 604 | WO2016049230 SEQ ID NO: 4 |
| AAVF12/HSC12 | 605 | WO2016049230 SEQ ID NO: 12 |
| AAVF13/HSC13 | 606 | WO2016049230 SEQ ID NO: 14 |
| AAVF14/HSC14 | 607 | WO2016049230 SEQ ID NO: 15 |
| AAVF15/HSC15 | 608 | WO2016049230 SEQ ID NO: 16 |
| AAVF16/HSC16 | 609 | WO2016049230 SEQ ID NO: 17 |
| AAVF17/HSC17 | 610 | WO2016049230 SEQ ID NO: 13 |
| AAV CBr-E1 | 611 | US8734809 SEQ ID NO: 13 |
| AAV CBr-E2 | 612 | US8734809 SEQ ID NO: 14 |
| AAV CBr-E3 | 613 | US8734809 SEQ ID NO: 15 |
| AAV CBr-E4 | 614 | US8734809 SEQ ID NO: 16 |
| AAV CBr-E5 | 615 | US8734809 SEQ ID NO: 17 |
| AAV CBr-e5 | 616 | US8734809 SEQ ID NO: 18 |
| AAV CBr-E6 | 617 | US8734809 SEQ ID NO: 19 |
| AAV CBr-E7 | 618 | US8734809 SEQ ID NO: 20 |
| AAV CBr-E8 | 619 | US8734809 SEQ ID NO: 21 |
| AAV CLv-D1 | 620 | US8734809 SEQ ID NO: 22 |
| AAV CLv-D2 | 621 | US8734809 SEQ ID NO: 23 |
| AAV CLv-D3 | 622 | US8734809 SEQ ID NO: 24 |
| AAV CLv-D4 | 623 | US8734809 SEQ ID NO: 25 |
| AAV CLv-D5 | 624 | US8734809 SEQ ID NO: 26 |
| AAV CLv-D6 | 625 | US8734809 SEQ ID NO: 27 |
| AAV CLv-D7 | 626 | US8734809 SEQ ID NO: 28 |
| AAV CLv-D8 | 627 | US8734809 SEQ ID NO: 29 |
| AAV CLv-E1 | 628 | US8734809 SEQ ID NO: 13 |
| AAV CLv-R1 | 629 | US8734809 SEQ ID NO: 30 |
| AAV CLv-R2 | 630 | US8734809 SEQ ID NO: 31 |
| AAV CLv-R3 | 631 | US8734809 SEQ ID NO: 32 |
| AAV CLv-R4 | 632 | US8734809 SEQ ID NO: 33 |
| AAV CLv-R5 | 633 | US8734809 SEQ ID NO: 34 |
| AAV CLv-R6 | 634 | US8734809 SEQ ID NO: 35 |
| AAV CLv-R7 | 635 | US8734809 SEQ ID NO: 36 |
| AAV CLv-R8 | 636 | US8734809 SEQ ID NO: 37 |
| AAV CLv-R9 | 637 | US8734809 SEQ ID NO: 38 |
| AAV CLg-F1 | 638 | US8734809 SEQ ID NO: 39 |
| AAV CLg-F2 | 639 | US8734809 SEQ ID NO: 40 |
| AAV CLg-F3 | 640 | US8734809 SEQ ID NO: 41 |
| AAV CLg-F4 | 641 | US8734809 SEQ ID NO: 42 |
| AAV CLg-F5 | 642 | US8734809 SEQ ID NO: 43 |
| AAV CLg-F6 | 643 | US8734809 SEQ ID NO: 43 |
| AAV CLg-F7 | 644 | US8734809 SEQ ID NO: 44 |
| AAV CLg-F8 | 645 | US8734809 SEQ ID NO: 43 |
| AAV CSp-1 | 646 | US8734809 SEQ ID NO: 45 |
| AAV CSp-10 | 647 | US8734809 SEQ ID NO: 46 |
| AAV CSp-11 | 648 | US8734809 SEQ ID NO: 47 |
| AAV CSp-2 | 649 | US8734809 SEQ ID NO: 48 |
| AAV CSp-3 | 650 | US8734809 SEQ ID NO: 49 |
| AAV CSp-4 | 651 | US8734809 SEQ ID NO: 50 |
| AAV CSp-6 | 652 | US8734809 SEQ ID NO: 51 |
| AAV CSp-7 | 653 | US8734809 SEQ ID NO: 52 |
| AAV CSp-8 | 654 | US8734809 SEQ ID NO: 53 |
| AAV CSp-9 | 655 | US8734809 SEQ ID NO: 54 |
| AAV CHt-2 | 656 | US8734809 SEQ ID NO: 55 |
| AAV CHt-3 | 657 | US8734809 SEQ ID NO: 56 |
| AAV CKd-1 | 658 | US8734809 SEQ ID NO: 57 |
| AAV CKd-10 | 659 | US8734809 SEQ ID NO: 58 |
| AAV CKd-2 | 660 | US8734809 SEQ ID NO: 59 |
| AAV CKd-3 | 661 | US8734809 SEQ ID NO: 60 |
| AAV CKd-4 | 662 | US8734809 SEQ ID NO: 61 |
| AAV CKd-6 | 663 | US8734809 SEQ ID NO: 62 |
| AAV CKd-7 | 664 | US8734809 SEQ ID NO: 63 |
| AAV CKd-8 | 665 | US8734809 SEQ ID NO: 64 |
| AAV CLv-1 | 666 | US8734809 SEQ ID NO: 65 |
| AAV CLv-12 | 667 | US8734809 SEQ ID NO: 66 |
| AAV CLv-13 | 668 | US8734809 SEQ ID NO: 67 |
| AAV CLv-2 | 669 | US8734809 SEQ ID NO: 68 |
| AAV CLv-3 | 670 | US8734809 SEQ ID NO: 69 |
| AAV CLv-4 | 671 | US8734809 SEQ ID NO: 70 |
| AAV CLv-6 | 672 | US8734809 SEQ ID NO: 71 |
| AAV CLv-8 | 673 | US8734809 SEQ ID NO: 72 |
| AAV CKd-B1 | 674 | US8734809 SEQ ID NO: 73 |
| AAV CKd-B2 | 675 | US8734809 SEQ ID NO: 74 |
| AAV CKd-B3 | 676 | US8734809 SEQ ID NO: 75 |
| AAV CKd-B4 | 677 | US8734809 SEQ ID NO: 76 |
| AAV CKd-B5 | 678 | US8734809 SEQ ID NO: 77 |
| AAV CKd-B6 | 679 | US8734809 SEQ ID NO: 78 |
| AAV CKd-B7 | 680 | US8734809 SEQ ID NO: 79 |
| AAV CKd-B8 | 681 | US8734809 SEQ ID NO: 80 |
| AAV CKd-H1 | 682 | US8734809 SEQ ID NO: 81 |
| AAV CKd-H2 | 683 | US8734809 SEQ ID NO: 82 |
| AAV CKd-H3 | 684 | US8734809 SEQ ID NO: 83 |
| AAV CKd-H4 | 685 | US8734809 SEQ ID NO: 84 |
| AAV CKd-H5 | 686 | US8734809 SEQ ID NO: 85 |
| AAV CKd-H6 | 687 | US8734809 SEQ ID NO: 77 |
| AAV CHt-1 | 688 | US8734809 SEQ ID NO: 86 |
| AAV CLv1-1 | 689 | US8734809 SEQ ID NO: 171 |
| AAV CLv1-2 | 690 | US8734809 SEQ ID NO: 172 |
| AAV CLv1-3 | 691 | US8734809 SEQ ID NO: 173 |
| AAV CLv1-4 | 692 | US8734809 SEQ ID NO: 174 |
| AAV Clv1-7 | 693 | US8734809 SEQ ID NO: 175 |
| AAV Clv-8 | 694 | US8734809 SEQ ID NO: 176 |
| AAV Clv1-9 | 695 | US8734809 SEQ ID NO: 177 |
| AAV Clv1-10 | 696 | US8734809 SEQ ID NO: 178 |
| AAV.VR-355 | 697 | US8734809 SEQ ID NO: 181 |
| AAV.hu.48R3 | 698 | US8734809 SEQ ID NO: 183 |
| AAV CBr-E1 | 699 | US8734809 SEQ ID NO: 87 |
| AAV CBr-E2 | 700 | US8734809 SEQ ID NO: 88 |
| AAV CBr-E3 | 701 | US8734809 SEQ ID NO: 89 |
| AAV CBr-E4 | 702 | US8734809 SEQ ID NO: 90 |
| AAV CBr-E5 | 703 | US8734809 SEQ ID NO: 91 |
| AAV CBr-e5 | 704 | US8734809 SEQ ID NO: 92 |
| AAV CBr-E6 | 705 | US8734809 SEQ ID NO: 93 |
| AAV CBr-E7 | 706 | US8734809 SEQ ID NO: 94 |
| AAV CBr-E8 | 707 | US8734809 SEQ ID NO: 95 |
| AAV CLv-D1 | 708 | US8734809 SEQ ID NO: 96 |
| AAV CLv-D2 | 709 | US8734809 SEQ ID NO: 97 |
| AAV CLv-D3 | 710 | US8734809 SEQ ID NO: 98 |
| AAV CLv-D4 | 711 | US8734809 SEQ ID NO: 99 |
| AAV CLv-D5 | 712 | US8734809 SEQ ID NO: 100 |
| AAV CLv-D6 | 713 | US8734809 SEQ ID NO: 101 |
| AAV CLv-D7 | 714 | US8734809 SEQ ID NO: 102 |
| AAV CLv-D8 | 715 | US8734809 SEQ ID NO: 103 |
| AAV CLv-E1 | 716 | US8734809 SEQ ID NO: 87 |
| AAV CLv-R1 | 717 | US8734809 SEQ ID NO: 104 |
| AAV CLv-R2 | 718 | US8734809 SEQ ID NO: 105 |
| AAV CLv-R3 | 719 | US8734809 SEQ ID NO: 106 |
| AAV CLv-R4 | 720 | US8734809 SEQ ID NO: 107 |
| AAV CLv-R5 | 721 | US8734809 SEQ ID NO: 108 |
| AAV CLv-R6 | 722 | US8734809 SEQ ID NO: 109 |
| AAV CLv-R7 | 723 | US8734809 SEQ ID NO: 110 |
| AAV CLv-R8 | 724 | US8734809 SEQ ID NO: 111 |
| AAV CLv-R9 | 725 | US8734809 SEQ ID NO: 112 |
| AAV CLg-F1 | 726 | US8734809 SEQ ID NO: 113 |
| AAV CLg-F2 | 727 | US8734809 SEQ ID NO: 114 |
| AAV CLg-F3 | 728 | US8734809 SEQ ID NO: 115 |
| AAV CLg-F4 | 729 | US8734809 SEQ ID NO: 116 |
| AAV CLg-F5 | 730 | US8734809 SEQ ID NO: 117 |
| AAV CLg-F6 | 731 | US8734809 SEQ ID NO: 117 |
| AAV CLg-F7 | 732 | US8734809 SEQ ID NO: 118 |
| AAV CLg-F8 | 733 | US8734809 SEQ ID NO: 117 |
| AAV CSp-1 | 734 | US8734809 SEQ ID NO: 119 |
| AAV CSp-10 | 735 | US8734809 SEQ ID NO: 120 |
| AAV CSp-11 | 736 | US8734809 SEQ ID NO: 121 |
| AAV CSp-2 | 737 | US8734809 SEQ ID NO: 122 |
| AAV CSp-3 | 738 | US8734809 SEQ ID NO: 123 |
| AAV CSp-4 | 739 | US8734809 SEQ ID NO: 124 |
| AAV CSp-6 | 740 | US8734809 SEQ ID NO: 125 |
| AAV CSp-7 | 741 | US8734809 SEQ ID NO: 126 |
| AAV CSp-8 | 742 | US8734809 SEQ ID NO: 127 |
| AAV CSp-9 | 743 | US8734809 SEQ ID NO: 128 |
| AAV CHt-2 | 744 | US8734809 SEQ ID NO: 129 |
| AAV CHt-3 | 745 | US8734809 SEQ ID NO: 130 |
| AAV CKd-1 | 746 | US8734809 SEQ ID NO: 131 |
| AAV CKd-10 | 747 | US8734809 SEQ ID NO: 132 |
| AAV CKd-2 | 748 | US8734809 SEQ ID NO: 133 |
| AAV CKd-3 | 749 | US8734809 SEQ ID NO: 134 |
| AAV CKd-4 | 750 | US8734809 SEQ ID NO: 135 |
| AAV CKd-6 | 751 | US8734809 SEQ ID NO: 136 |
| AAV CKd-7 | 752 | US8734809 SEQ ID NO: 137 |
| AAV CKd-8 | 753 | US8734809 SEQ ID NO: 138 |
| AAV CLv-1 | 754 | US8734809 SEQ ID NO: 139 |
| AAV CLv-12 | 755 | US8734809 SEQ ID NO: 140 |
| AAV CLv-13 | 756 | US8734809 SEQ ID NO: 141 |
| AAV CLv-2 | 757 | US8734809 SEQ ID NO: 142 |
| AAV CLv-3 | 758 | US8734809 SEQ ID NO: 143 |
| AAV CLv-4 | 759 | US8734809 SEQ ID NO: 144 |
| AAV CLv-6 | 760 | US8734809 SEQ ID NO: 145 |
| AAV CLv-8 | 761 | US8734809 SEQ ID NO: 146 |
| AAV CKd-B1 | 762 | US8734809 SEQ ID NO: 147 |
| AAV CKd-B2 | 763 | US8734809 SEQ ID NO: 148 |
| AAV CKd-B3 | 764 | US8734809 SEQ ID NO: 149 |
| AAV CKd-B4 | 765 | US8734809 SEQ ID NO: 150 |
| AAV CKd-B5 | 766 | US8734809 SEQ ID NO: 151 |
| AAV CKd-B6 | 767 | US8734809 SEQ ID NO: 152 |
| AAV CKd-B7 | 768 | US8734809 SEQ ID NO: 153 |
| AAV CKd-B8 | 769 | US8734809 SEQ ID NO: 154 |
| AAV CKd-H1 | 770 | US8734809 SEQ ID NO: 155 |
| AAV CKd-H2 | 771 | US8734809 SEQ ID NO: 156 |
| AAV CKd-H3 | 772 | US8734809 SEQ ID NO: 157 |
| AAV CKd-H4 | 773 | US8734809 SEQ ID NO: 158 |
| AAV CKd-H5 | 774 | US8734809 SEQ ID NO: 159 |
| AAV CKd-H6 | 775 | US8734809 SEQ ID NO: 151 |
| AAV CHt-1 | 776 | US8734809 SEQ ID NO: 160 |
| AAV CHt-P2 | 777 | WO2016065001 SEQ ID NO: 1 |
| AAV CHt-P5 | 778 | WO2016065001 SEQ ID NO: 2 |
| AAV CHt-P9 | 779 | WO2016065001 SEQ ID NO: 3 |
| AAV CBr-7.1 | 780 | WO2016065001 SEQ ID NO: 4 |
| AAV CBr-7.2 | 781 | WO2016065001 SEQ ID NO: 5 |
| AAV CBr-7.3 | 782 | WO2016065001 SEQ ID NO: 6 |
| AAV CBr-7.4 | 783 | WO2016065001 SEQ ID NO: 7 |
| AAV CBr-7.5 | 784 | WO2016065001 SEQ ID NO: 8 |
| AAV CBr-7.7 | 785 | WO2016065001 SEQ ID NO: 9 |
| AAV CBr-7.8 | 786 | WO2016065001 SEQ ID NO: 10 |
| AAV CBr-7.10 | 787 | WO2016065001 SEQ ID NO: 11 |
| AAV CKd-N3 | 788 | WO2016065001 SEQ ID NO: 12 |
| AAV CKd-N4 | 789 | WO2016065001 SEQ ID NO: 13 |
| AAV CKd-N9 | 790 | WO2016065001 SEQ ID NO: 14 |
| AAV CLv-L4 | 791 | WO2016065001 SEQ ID NO: 15 |
| AAV CLv-L5 | 792 | WO2016065001 SEQ ID NO: 16 |
| AAV CLv-L6 | 793 | WO2016065001 SEQ ID NO: 17 |
| AAV CLv-K1 | 794 | WO2016065001 SEQ ID NO: 18 |
| AAV CLv-K3 | 795 | WO2016065001 SEQ ID NO: 19 |
| AAV CLv-K6 | 796 | WO2016065001 SEQ ID NO: 20 |
| AAV CLv-M1 | 797 | WO2016065001 SEQ ID NO: 21 |
| AAV CLv-M11 | 798 | WO2016065001 SEQ ID NO: 22 |
| AAV CLv-M2 | 799 | WO2016065001 SEQ ID NO: 23 |
| AAV CLv-M5 | 800 | WO2016065001 SEQ ID NO: 24 |
| AAV CLv-M6 | 801 | WO2016065001 SEQ ID NO: 25 |
| AAV CLv-M7 | 802 | WO2016065001 SEQ ID NO: 26 |
| AAV CLv-M8 | 803 | WO2016065001 SEQ ID NO: 27 |
| AAV CLv-M9 | 804 | WO2016065001 SEQ ID NO: 28 |
| AAV CHt-P1 | 805 | WO2016065001 SEQ ID NO: 29 |
| AAV CHt-P6 | 806 | WO2016065001 SEQ ID NO: 30 |
| AAV CHt-P8 | 807 | WO2016065001 SEQ ID NO: 31 |
| AAV CHt-6.1 | 808 | WO2016065001 SEQ ID NO: 32 |
| AAV CHt6.10 | 809 | WO2016065001 SEQ ID NO: 33 |
| AAV CHt-6.5 | 810 | WO2016065001 SEQ ID NO: 34 |
| AAV CHt-6.6 | 811 | WO2016065001 SEQ ID NO: 35 |
| AAV CHt-6.7 | 812 | WO2016065001 SEQ ID NO: 36 |
| AAV CHt-6.8 | 813 | WO2016065001 SEQ ID NO: 37 |
| AAV CSp-8.10 | 814 | WO2016065001 SEQ ID NO: 38 |
| AAV CSp-8.2 | 815 | WO2016065001 SEQ ID NO: 39 |
| AAV CSp-8.4 | 816 | WO2016065001 SEQ ID NO: 40 |
| AAV CSp-8.5 | 817 | WO2016065001 SEQ ID NO: 41 |
| AAV CSp-8.6 | 818 | WO2016065001 SEQ ID NO: 42 |
| AAV CSp-8.7 | 819 | WO2016065001 SEQ ID NO: 43 |
| AAV CSp-8.8 | 870 | WO2016065001 SEQ ID NO: 44 |
| AAV CSp-8.9 | 821 | WO2016065001 SEQ ID NO: 45 |
| AAV CBr-B7.3 | 822 | WO2016065001 SEQ ID NO: 46 |
| AAV CBr-B7.4 | 823 | WO2016065001 SEQ ID NO: 47 |
| AAV3B | 824 | WO2016065001 SEQ ID NO: 48 |
| AAV4 | 825 | WO2016065001 SEQ ID NO: 49 |
| AAV5 | 826 | WO2016065001 SEQ ID NO: 50 |
| AAV CHt-P2 | 827 | WO2016065001 SEQ ID NO: 51 |
| AAV CHt-P5 | 828 | WO2016065001 SEQ ID NO: 52 |
| AAV CHt-P9 | 829 | WO2016065001 SEQ ID NO: 53 |
| AAV CBr-7.1 | 830 | WO2016065001 SEQ ID NO: 54 |
| AAV CBr-7.2 | 831 | WO2016065001 SEQ ID NO: 55 |
| AAV CBr-7.3 | 832 | WO2016065001 SEQ ID NO: 56 |
| AAV CBr-7.4 | 833 | WO2016065001 SEQ ID NO: 57 |
| AAV CBr-7.5 | 834 | WO2016065001 SEQ ID NO: 58 |
| AAV CBr-7.7 | 835 | WO2016065001 SEQ ID NO: 59 |
| AAV CBr-7.8 | 836 | WO2016065001 SEQ ID NO: 60 |
| AAV CBr-7.10 | 837 | WO2016065001 SEQ ID NO: 61 |
| AAV CKd-N3 | 838 | WO2016065001 SEQ ID NO: 62 |
| AAV CKd-N4 | 839 | WO2016065001 SEQ ID NO: 63 |
| AAV CKd-N9 | 840 | WO2016065001 SEQ ID NO: 64 |
| AAV CLv-L4 | 841 | WO2016065001 SEQ ID NO: 65 |
| AAV CLv-L5 | 842 | WO2016065001 SEQ ID NO: 66 |
| AAV CLv-L6 | 843 | WO2016065001 SEQ ID NO: 67 |
| AAV CLv-K1 | 844 | WO2016065001 SEQ ID NO: 68 |
| AAV CLv-K3 | 845 | WO2016065001 SEQ ID NO: 69 |
| AAV CLv-K6 | 846 | WO2016065001 SEQ ID NO: 70 |
| AAV CLv-M1 | 847 | WO2016065001 SEQ ID NO: 71 |
| AAV CLv-M11 | 848 | WO2016065001 SEQ ID NO: 72 |
| AAV CLv-M2 | 849 | WO2016065001 SEQ ID NO: 73 |
| AAV CLv-M5 | 850 | WO2016065001 SEQ ID NO: 74 |
| AAV CLv-M6 | 851 | WO2016065001 SEQ ID NO: 75 |
| AAV CLv-M7 | 852 | WO2016065001 SEQ ID NO: 76 |
| AAV CLv-M8 | 853 | WO2016065001 SEQ ID NO: 77 |
| AAV CLv-M9 | 854 | WO2016065001 SEQ ID NO: 78 |
| AAV CHt-P1 | 855 | WO2016065001 SEQ ID NO: 79 |
| AAV CHt-P6 | 856 | WO2016065001 SEQ ID NO: 80 |
| AAV CHt-P8 | 857 | WO2016065001 SEQ ID NO: 81 |
| AAV CHt-6.1 | 858 | WO2016065001 SEQ ID NO: 82 |
| AAV CHt-6.10 | 859 | WO2016065001 SEQ ID NO: 83 |
| AAV CHt-6.5 | 860 | WO2016065001 SEQ ID NO: 84 |
| AAV CHt-6.6 | 861 | WO2016065001 SEQ ID NO: 85 |
| AAV CHt-6.7 | 862 | WO2016065001 SEQ ID NO: 86 |
| AAV CHt-6.8 | 863 | WO2016065001 SEQ ID NO: 87 |
| AAV CSp-8.10 | 864 | WO2016065001 SEQ ID NO: 88 |
| AAV CSp-8.2 | 865 | WO2016065001 SEQ ID NO: 89 |
| AAV CSp-8.4 | 866 | WO2016065001 SEQ ID NO: 90 |
| AAV CSp-8.5 | 867 | WO2016065001 SEQ ID NO: 91 |
| AAV CSp-8.6 | 868 | WO2016065001 SEQ ID NO: 92 |
| AAV CSp-8.7 | 869 | WO2016065001 SEQ ID NO: 93 |
| AAV CSp-8.8 | 870 | WO2016065001 SEQ ID NO: 94 |
| AAV CSp-8.9 | 871 | WO2016065001 SEQ ID NO: 95 |
| AAV CBr-B7.3 | 872 | WO2016065001 SEQ ID NO: 96 |
| AAV CBr-B7.4 | 873 | WO2016065001 SEQ ID NO: 97 |
| AAV3B | 874 | WO2016065001 SEQ ID NO: 98 |
| AAV4 | 875 | WO2016065001 SEQ ID NO: 99 |
| AAV5 | 876 | WO2016065001 SEQ ID NO: 100 |
| GPV | 877 | US9624274B2 SEQ ID NO: 192 |
| B19 | 878 | US9624274B2 SEQ ID NO: 193 |
| MVM | 879 | US9624274B2 SEQ ID NO: 194 |
| FPV | 880 | US9624274B2 SEQ ID NO: 195 |
| CPV | 881 | US9624274B2 SEQ ID NO: 196 |
| AAV6 | 882 | US9546112B2 SEQ ID NO: 5 |
| AAV6 | 883 | US9457103B2 SEQ ID NO: 1 |
| AAV2 | 884 | US9457103B2 SEQ ID NO: 2 |
| ShH10 | 885 | US9457103B2 SEQ ID NO: 3 |
| ShH13 | 886 | US9457103B2 SEQ ID NO: 4 |
| ShH10 | 887 | US9457103B2 SEQ ID NO: 5 |
| ShH10 | 888 | US9457103B2 SEQ ID NO: 6 |
| ShH10 | 889 | US9457103B2 SEQ ID NO: 7 |
| ShH10 | 890 | US9457103B2 SEQ ID NO: 8 |
| ShH10 | 891 | US9457103B2 SEQ ID NO: 9 |
| rh74 | 892 | US9434928B2 SEQ ID NO: 1, US2015023924A1 |
| | | SEQ ID NO: 2 |
| rh74 | 893 | US9434928B2 SEQ ID NO: 2, US2015023924A1 |
| | | SEQ ID NO: 1 |
| AAV8 | 894 | US9434928B2 SEQ ID NO: 4 |
| rh74 | 895 | US9434928B2 SEQ ID NO: 5 |
| rh74 (RHM4-1) | 896 | US2015023924A1 SEQ ID NO: 5, US20160375110A1 |
| | | SEQ ID NO: 4 |
| rh74 (RHM15-1) | 897 | US2015023924A1 SEQ ID NO: 6, US20160375110A1 |
| | | SEQ ID NO: 5 |
| rh74 (RHM15-2) | 898 | US2015023924A1 SEQ ID NO: 7, US20160375110A1 |
| | | SEQ ID NO: 6 |
| rh74 (RHM15-3/ | 899 | US2015023924A1 SEQ ID NO: 8, US20160375110A1 |
| RHM15-5) | | SEQ ID NO: 7 |
| rh74 (RHM15-4) | 900 | US2015023924A1 SEQ ID NO: 9, US20160375110A1 |
| | | SEQ ID NO: 8 |
| rh74 (RHM15-6) | 901 | US2015023924A1 SEQ ID NO: 10, US20160375110A1 |
| | | SEQ ID NO: 9 |
| rh74 (RHM4-1) | 902 | US2015023924A1 SEQ ID NO: 11 |
| rh74 (RHM15-1) | 903 | US2015023924A1 SEQ ID NO: 12 |
| rh74 (RHM15-2) | 904 | US2015023924A1 SEQ ID NO: 13 |
| rh74 (RHM15-3/ | 905 | US2015023924A1 SEQ ID NO: 14 |
| RHM15-5) | | |
| rh74 (RHM15-4) | 906 | US2015023924A1 SEQ ID NO: 15 |
| rh74 (RHM15-6) | 907 | US2015023924A1 SEQ ID NO: 16 |
| AAV2 (comprising lung | 908 | US20160175389A1 SEQ ID NO: 9 |
| specific polypeptide) | | |
| AAV2 (comprising lung | 909 | US20160175389A1 SEQ ID NO: 10 |
| specific polypeptide) | | |
| Anc80 | 910 | US20170051257A1 SEQ ID NO: 1 |
| Anc80 | 911 | US20170051257A1 SEQ ID NO: 2 |
| Anc81 | 912 | US20170051257A1 SEQ ID NO: 3 |
| Anc80 | 913 | US20170051257A1 SEQ ID NO: 4 |
| Anc82 | 914 | US20170051257A1 SEQ ID NO: 5 |
| Anc82 | 915 | US20170051257A1 SEQ ID NO: 6 |
| Anc83 | 916 | US20170051257A1 SEQ ID NO: 7 |
| Anc83 | 917 | US20170051257A1 SEQ ID NO: 8 |
| Anc84 | 918 | US20170051257A1 SEQ ID NO: 9 |
| Anc84 | 919 | US20170051257A1 SEQ ID NO: 10 |
| Anc94 | 920 | US20170051257A1 SEQ ID NO: 11 |
| Anc94 | 921 | US20170051257A1 SEQ ID NO: 12 |
| Anc113 | 922 | US20170051257A1 SEQ ID NO: 13 |
| Anc113 | 923 | US20170051257A1 SEQ ID NO: 14 |
| Anc126 | 924 | US20170051257A1 SEQ ID NO: 15 |
| Anc126 | 925 | US20170051257A1 SEQ ID NO: 16 |
| Anc127 | 926 | US20170051257A1 SEQ ID NO: 17 |
| Anc127 | 927 | US20170051257A1 SEQ ID NO: 18 |
| Anc80L27 | 928 | US20170051257A1 SEQ ID NO: 19 |
| Anc80L59 | 929 | US20170051257A1 SEQ ID NO: 20 |
| Anc80L60 | 930 | US20170051257A1 SEQ ID NO: 21 |
| Anc80L62 | 931 | US20170051257A1 SEQ ID NO: 22 |
| Anc80L65 | 932 | US20170051257A1 SEQ ID NO: 23 |
| Anc80L33 | 933 | US20170051257A1 SEQ ID NO: 24 |
| Anc80L36 | 934 | US20170051257A1 SEQ ID NO: 25 |
| Anc80L44 | 935 | US20170051257A1 SEQ ID NO: 26 |
| Anc80L1 | 936 | US20170051257A1 SEQ ID NO: 35 |
| Anc80L1 | 937 | US20170051257A1 SEQ ID NO: 36 |
| AAV-X1 | 938 | US8283151B2 SEQ ID NO: 11 |
| AAV-X1b | 939 | US8283151B2 SEQ ID NO: 12 |
| AAV-X5 | 940 | US8283151B2 SEQ ID NO: 13 |
| AAV-X19 | 941 | US8283151B2 SEQ ID NO: 14 |
| AAV-X21 | 942 | US8283151B2 SEQ ID NO: 15 |
| AAV-X22 | 943 | US8283151B2 SEQ ID NO: 16 |
| AAV-X23 | 944 | US8283151B2 SEQ ID NO: 17 |
| AAV-X24 | 945 | US8283151B2 SEQ ID NO: 18 |
| AAV-X25 | 946 | US8283151B2 SEQ ID NO: 19 |
| AAV-X26 | 947 | US8283151B2 SEQ ID NO: 20 |
| AAV-X1 | 948 | US8283151B2 SEQ ID NO: 21 |
| AAV-X1b | 949 | US8283151B2 SEQ ID NO: 22 |
| AAV-X5 | 950 | US8283151B2 SEQ ID NO: 23 |
| AAV-X19 | 951 | US8283151B2 SEQ ID NO: 24 |
| AAV-X21 | 952 | US8283151B2 SEQ ID NO: 25 |
| AAV-X22 | 953 | US8283151B2 SEQ ID NO: 26 |
| AAV-X23 | 954 | US8283151B2 SEQ ID NO: 27 |
| AAV-X24 | 955 | US8283151B2 SEQ ID NO: 28 |
| AAV-X25 | 956 | US8283151B2 SEQ ID NO: 29 |
| AAV-X26 | 957 | US8283151B2 SEQ ID NO: 30 |
| AAVrh8 | 958 | WO2016054554A1 SEQ ID NO: 8 |
| AAVrh8VP2FC5 | 959 | WO2016054554A1 SEQ ID NO: 9 |
| AAVrh8VP2FC44 | 960 | WO2016054554A1 SEQ ID NO: 10 |
| AAVrh8VP2ApoB100 | 961 | WO2016054554A1 SEQ ID NO: 11 |
| AAVrh8VP2RVG | 962 | WO2016054554A1 SEQ ID NO: 12 |
| AAVrh8VP2Angiopep-2 | 963 | WO2016054554A1 SEQ ID NO: 13 |
| VP2 | | |
| AAV9.47VP1.3 | 964 | WO2016054554A1 SEQ ID NO: 14 |
| AAV9.47VP2ICAMg3 | 965 | WO2016054554A1 SEQ ID NO: 15 |
| AAV9.47VP2RVG | 966 | WO2016054554A1 SEQ ID NO: 16 |
| AAV9.47VP2Angiopep-2 | 967 | WO2016054554A1 SEQ ID NO: 17 |
| AAV9.47VP2A-string | 968 | WO2016054554A1 SEQ ID NO: 18 |
| AAVrh8VP2FC5 VP2 | 969 | WO2016054554A1 SEQ ID NO: 19 |
| AAVrh8VP2FC44 VP2 | 970 | WO2016054554A1 SEQ ID NO: 20 |
| AAVrh8VP2ApoB100 VP2 | 971 | WO2016054554A1 SEQ ID NO: 21 |
| AAVrh8VP2RVG VP2 | 972 | WO2016054554A1 SEQ ID NO: 22 |
| AAVrh8VP2Angiopep-2 | 973 | WO2016054554A1 SEQ ID NO: 23 |
| VP2 | | |
| AAV9.47VP2ICAMg3 VP2 | 974 | WO2016054554A1 SEQ ID NO: 24 |
| AAV9.47VP2RVG VP2 | 975 | WO2016054554A1 SEQ ID NO: 25 |
| AAV9.47VP2Angiopep-2 | 976 | WO2016054554A1 SEQ ID NO: 26 |
| VP2 | | |
| AAV9.47VP2A-string VP2 | 977 | WO2016054554A1 SEQ ID NO: 27 |
| rAAV-B1 | 978 | WO2016054557A1 SEQ ID NO: 1 |
| rAAV-B2 | 979 | WO2016054557A1 SEQ ID NO: 2 |
| rAAV-B3 | 980 | WO2016054557A1 SEQ ID NO: 3 |
| rAAV-B4 | 981 | WO2016054557A1 SEQ ID NO: 4 |
| rAAV-B1 | 982 | WO2016054557A1 SEQ ID NO: 5 |
| rAAV-B2 | 983 | WO2016054557A1 SEQ ID NO: 6 |
| rAAV-B3 | 984 | WO2016054557A1 SEQ ID NO: 7 |
| rAAV-B4 | 985 | WO2016054557A1 SEQ ID NO: 8 |
| rAAV-L1 | 986 | WO2016054557A1 SEQ ID NO: 9 |
| rAAV-L2 | 987 | WO2016054557A1 SEQ ID NO: 10 |
| rAAV-L3 | 988 | WO2016054557A1 SEQ ID NO: 11 |
| rAAV-L4 | 989 | WO2016054557A1 SEQ ID NO: 12 |
| rAAV-L1 | 990 | WO2016054557A1 SEQ ID NO: 13 |
| rAAV-L2 | 991 | WO2016054557A1 SEQ ID NO: 14 |
| rAAV-L3 | 992 | WO2016054557A1 SEQ ID NO: 15 |
| rAAV-L4 | 993 | WO2016054557A1 SEQ ID NO: 16 |
| AAV9 | 994 | WO2016073739A1 SEQ ID NO: 3 |
| rAAV | 995 | WO2016081811A1 SEQ ID NO: 1 |
| rAAV | 996 | WO2016081811A1 SEQ ID NO: 2 |
| rAAV | 997 | WO2016081811A1 SEQ ID NO: 3 |
| rAAV | 998 | WO2016081811A1 SEQ ID NO: 4 |
| rAAV | 999 | WO2016081811A1 SEQ ID NO: 5 |
| rAAV | 1000 | WO2016081811A1 SEQ ID NO: 6 |
| rAAV | 1001 | WO2016081811A1 SEQ ID NO: 7 |
| rAAV | 1002 | WO2016081811A1 SEQ ID NO: 8 |
| rAAV | 1003 | WO2016081811A1 SEQ ID NO: 9 |
| rAAV | 1004 | WO2016081811A1 SEQ ID NO: 10 |
| rAAV | 1005 | WO2016081811A1 SEQ ID NO: 11 |
| rAAV | 1006 | WO2016081811A1 SEQ ID NO: 12 |
| rAAV | 1007 | WO2016081811A1 SEQ ID NO: 13 |
| rAAV | 1008 | WO2016081811A1 SEQ ID NO: 14 |
| rAAV | 1009 | WO2016081811A1 SEQ ID NO: 15 |
| rAAV | 1010 | WO2016081811A1 SEQ ID NO: 16 |
| rAAV | 1011 | WO2016081811A1 SEQ ID NO: 17 |
| rAAV | 1012 | WO2016081811A1 SEQ ID NO: 18 |
| rAAV | 1013 | WO2016081811A1 SEQ ID NO: 19 |
| rAAV | 1014 | WO2016081811A1 SEQ ID NO: 20 |
| rAAV | 1015 | WO2016081811A1 SEQ ID NO: 21 |
| rAAV | 1016 | WO2016081811A1 SEQ ID NO: 22 |
| rAAV | 1017 | WO2016081811A1 SEQ ID NO: 23 |
| rAAV | 1018 | WO2016081811A1 SEQ ID NO: 24 |
| rAAV | 1019 | WO2016081811A1 SEQ ID NO: 25 |
| rAAV | 1020 | WO2016081811A1 SEQ ID NO: 26 |
| rAAV | 1021 | WO2016081811A1 SEQ ID NO: 27 |
| rAAV | 1022 | WO2016081811A1 SEQ ID NO: 28 |
| rAAV | 1023 | WO2016081811A1 SEQ ID NO: 29 |
| rAAV | 1024 | WO2016081811A1 SEQ ID NO: 30 |
| rAAV | 1025 | WO2016081811A1 SEQ ID NO: 31 |
| rAAV | 1026 | WO2016081811A1 SEQ ID NO: 32 |
| rAAV | 1027 | WO2016081811A1 SEQ ID NO: 33 |
| rAAV | 1028 | WO2016081811A1 SEQ ID NO: 34 |
| rAAV | 1029 | WO2016081811A1 SEQ ID NO: 35 |
| rAAV | 1030 | WO2016081811A1 SEQ ID NO: 36 |
| rAAV | 1031 | WO2016081811A1 SEQ ID NO: 37 |
| rAAV | 1032 | WO2016081811A1 SEQ ID NO: 38 |
| rAAV | 1033 | WO2016081811A1 SEQ ID NO: 39 |
| rAAV | 1034 | WO2016081811A1 SEQ ID NO: 40 |
| rAAV | 1035 | WO2016081811A1 SEQ ID NO: 41 |
| rAAV | 1036 | WO2016081811A1 SEQ ID NO: 42 |
| rAAV | 1037 | WO2016081811A1 SEQ ID NO: 43 |
| rAAV | 1038 | WO2016081811A1 SEQ ID NO: 44 |
| rAAV | 1039 | WO2016081811A1 SEQ ID NO: 45 |
| rAAV | 1040 | WO2016081811A1 SEQ ID NO: 46 |
| rAAV | 1041 | WO2016081811A1 SEQ ID NO: 47 |
| rAAV | 1042 | WO2016081811A1 SEQ ID NO: 48 |
| rAAV | 1043 | WO2016081811A1 SEQ ID NO: 49 |
| rAAV | 1044 | WO2016081811A1 SEQ ID NO: 50 |
| rAAV | 1045 | WO2016081811A1 SEQ ID NO: 51 |
| rAAV | 1046 | WO2016081811A1 SEQ ID NO: 52 |
| rAAV | 1047 | WO2016081811A1 SEQ ID NO: 53 |
| rAAV | 1048 | WO2016081811A1 SEQ ID NO: 54 |
| rAAV | 1049 | WO2016081811A1 SEQ ID NO: 55 |
| rAAV | 1050 | WO2016081811A1 SEQ ID NO: 56 |
| rAAV | 1051 | WO2016081811A1 SEQ ID NO: 57 |
| rAAV | 1052 | WO2016081811A1 SEQ ID NO: 58 |
| rAAV | 1053 | WO2016081811A1 SEQ ID NO: 59 |
| rAAV | 1054 | WO2016081811A1 SEQ 1D NO: 60 |
| rAAV | 1055 | WO2016081811A1 SEQ ID NO: 61 |
| rAAV | 1056 | WO2016081811A1 SEQ ID NO: 62 |
| rAAV | 1057 | WO2016081811A1 SEQ ID NO: 63 |
| rAAV | 1058 | WO2016081811A1 SEQ ID NO: 64 |
| rAAV | 1059 | WO2016081811A1 SEQ ID NO: 65 |
| rAAV | 1060 | WO2016081811A1 SEQ ID NO: 66 |
| rAAV | 1061 | WO2016081811A1 SEQ ID NO: 67 |
| rAAV | 1062 | WO2016081811A1 SEQ ID NO: 68 |
| rAAV | 1063 | WO2016081811A1 SEQ ID NO: 69 |
| rAAV | 1064 | WO2016081811A1 SEQ ID NO: 70 |
| rAAV | 1065 | WO2016081811A1 SEQ ID NO: 71 |
| rAAV | 1066 | WO2016081811A1 SEQ ID NO: 72 |
| rAAV | 1067 | WO2016081811A1 SEQ ID NO: 73 |
| rAAV | 1068 | WO2016081811A1 SEQ ID NO: 74 |
| rAAV | 1069 | WO2016081811A1 SEQ ID NO: 75 |
| rAAV | 1070 | WO2016081811A1 SEQ ID NO: 76 |
| rAAV | 1071 | WO2016081811A1 SEQ ID NO: 77 |
| rAAV | 1072 | WO2016081811A1 SEQ ID NO: 78 |
| rAAV | 1073 | WO2016081811A1 SEQ ID NO: 79 |
| rAAV | 1074 | WO2016081811A1 SEQ ID NO: 80 |
| rAAV | 1075 | WO2016081811A1 SEQ ID NO: 81 |
| rAAV | 1076 | WO2016081811A1 SEQ ID NO: 82 |
| rAAV | 1077 | WO2016081811A1 SEQ ID NO: 83 |
| rAAV | 1078 | WO2016081811A1 SEQ ID NO: 84 |
| rAAV | 1079 | WO2016081811A1 SEQ ID NO: 85 |
| rAAV | 1080 | WO2016081811A1 SEQ ID NO: 86 |
| rAAV | 1081 | WO2016081811A1 SEQ ID NO: 87 |
| rAAV | 1082 | WO2016081811A1 SEQ ID NO: 88 |
| rAAV | 1083 | WO2016081811A1 SEQ ID NO: 89 |
| rAAV | 1084 | WO2016081811A1 SEQ ID NO: 90 |
| rAAV | 1085 | WO2016081811A1 SEQ ID NO: 91 |
| rAAV | 1086 | WO2016081811A1 SEQ ID NO: 92 |
| rAAV | 1087 | WO2016081811A1 SEQ ID NO: 93 |
| rAAV | 1088 | WO2016081811A1 SEQ ID NO: 94 |
| rAAV | 1089 | WO2016081811A1 SEQ ID NO: 95 |
| rAAV | 1090 | WO2016081811A1 SEQ ID NO: 96 |
| rAAV | 1091 | WO2016081811A1 SEQ ID NO: 97 |
| rAAV | 1092 | WO2016081811A1 SEQ ID NO: 98 |
| rAAV | 1093 | WO2016081811A1 SEQ ID NO: 99 |
| rAAV | 1094 | WO2016081811A1 SEQ ID NO: 100 |
| rAAV | 1095 | WO2016081811A1 SEQ ID NO: 101 |
| rAAV | 1096 | WO2016081811A1 SEQ ID NO: 102 |
| rAAV | 1097 | WO2016081811A1 SEQ ID NO: 103 |
| rAAV | 1098 | WO2016081811A1 SEQ ID NO: 104 |
| rAAV | 1099 | WO2016081811A1 SEQ ID NO: 105 |
| rAAV | 1100 | WO2016081811A1 SEQ ID NO: 106 |
| rAAV | 1101 | WO2016081811A1 SEQ ID NO: 107 |
| rAAV | 1102 | WO2016081811A1 SEQ ID NO: 108 |
| rAAV | 1103 | WO2016081811A1 SEQ ID NO: 109 |
| rAAV | 1104 | WO2016081811A1 SEQ ID NO: 110 |
| rAAV | 1105 | WO2016081811A1 SEQ ID NO: 111 |
| rAAV | 1106 | WO2016081811A1 SEQ ID NO: 112 |
| rAAV | 1107 | WO2016081811A1 SEQ ID NO: 113 |
| rAAV | 1108 | WO2016081811A1 SEQ ID NO: 114 |
| rAAV | 1109 | WO2016081811A1 SEQ ID NO: 115 |
| rAAV | 1110 | WO2016081811A1 SEQ ID NO: 116 |
| rAAV | 1111 | WO2016081811A1 SEQ ID NO: 117 |
| rAAV | 1112 | WO2016081811A1 SEQ ID NO: 118 |
| rAAV | 1113 | WO2016081811A1 SEQ ID NO: 119 |
| rAAV | 1114 | WO2016081811A1 SEQ ID NO: 120 |
| rAAV | 1115 | WO2016081811A1 SEQ ID NO: 121 |
| rAAV | 1116 | WO2016081811A1 SEQ ID NO: 122 |
| rAAV | 1117 | WO2016081811A1 SEQ ID NO: 123 |
| rAAV | 1118 | WO2016081811A1 SEQ ID NO: 124 |
| rAAV | 1119 | WO2016081811A1 SEQ ID NO: 125 |
| rAAV | 1120 | WO2016081811A1 SEQ ID NO: 126 |
| rAAV | 1121 | WO2016081811A1 SEQ ID NO: 127 |
| rAAV | 1122 | WO2016081811A1 SEQ ID NO: 128 |
| AAV8 E532K | 1123 | WO2016081811A1 SEQ ID NO: 133 |
| AAV8 E532K | 1124 | WO2016081811A1 SEQ ID NO: 134 |
| rAAV4 | 1125 | WO2016115382A1 SEQ ID NO: 2 |
| rAAV4 | 1126 | WO2016115382A1 SEQ ID NO: 3 |
| rAAV4 | 1127 | WO2016115382A1 SEQ ID NO: 4 |
| rAAV4 | 1128 | WO2016115382A1 SEQ ID NO: 5 |
| rAAV4 | 1129 | WO2016115382A1 SEQ ID NO: 6 |
| rAAV4 | 1130 | WO2016115382A1 SEQ ID NO: 7 |
| rAAV4 | 1131 | WO2016115382A1 SEQ ID NO: 8 |
| rAAV4 | 1132 | WO2016115382A1 SEQ ID NO: 9 |
| rAAV4 | 1133 | WO2016115382A1 SEQ ID NO: 10 |
| rAAV4 | 1134 | WO2016115382A1 SEQ ID NO: 11 |
| rAAV4 | 1135 | WO2016115382A1 SEQ ID NO: 12 |
| rAAV4 | 1136 | WO2016115382A1 SEQ ID NO: 13 |
| rAAV4 | 1137 | WO2016115382A1 SEQ ID NO: 14 |
| rAAV4 | 1138 | WO2016115382A1 SEQ ID NO: 15 |
| rAAV4 | 1139 | WO2016115382A1 SEQ ID NO: 16 |
| rAAV4 | 1140 | WO2016115382A1 SEQ ID NO: 17 |
| rAAV4 | 1141 | WO2016115382A1 SEQ ID NO: 18 |
| rAAV4 | 1142 | WO2016115382A1 SEQ ID NO: 19 |
| rAAV4 | 1143 | WO2016115382A1 SEQ ID NO: 20 |
| rAAV4 | 1144 | WO2016115382A1 SEQ ID NO: 21 |
| AAV11 | 1145 | WO2016115382A1 SEQ ID NO: 22 |
| AAV12 | 1146 | WO2016115382A1 SEQ ID NO: 23 |
| rh32 | 1147 | WO2016115382A1 SEQ ID NO: 25 |
| rh33 | 1148 | WO2016115382A1 SEQ ID NO: 26 |
| rh34 | 1149 | WO2016115382A1 SEQ ID NO: 27 |
| rAAV4 | 1150 | WO2016115382A1 SEQ ID NO: 28 |
| rAAV4 | 1151 | WO2016115382A1 SEQ ID NO: 29 |
| rAAV4 | 1152 | WO2016115382A1 SEQ ID NO: 30 |
| rAAV4 | 1153 | WO2016115382A1 SEQ ID NO: 31 |
| rAAV4 | 1154 | WO2016115382A1 SEQ ID NO: 32 |
| rAAV4 | 1155 | WO2016115382A1 SEQ ID NO: 33 |
| AAV2/8 | 1156 | WO2016131981A1 SEQ ID NO: 47 |
| AAV2/8 | 1157 | WO2016131981A1 SEQ ID NO: 48 |
| ancestral AAV | 1158 | WO2016154344A1 SEQ ID NO: 7 |
| ancestral AAV variant C4 | 1159 | WO2016154344A1 SEQ ID NO: 13 |
| ancestral AAV variant C7 | 1160 | WO2016154344A1 SEQ ID NO: 14 |
| ancestral AAV variant G4 | 1161 | WO2016154344A1 SEQ ID NO: 15 |
| consensus amino acid | 1162 | WO2016154344A1 SEQ ID NO: 16 |
| sequence of ancestral AAV | | |
| variants, C4, C7 and G4 | | |
| consensus amino acid | 1163 | WO2016154344A1 SEQ ID NO: 17 |
| sequence of ancestral AAV | | |
| variants, C4 and C7 | | |
| AAV8 (with a AAV2 | 1164 | WO2016150403A1 SEQ ID NO: 13 |
| phospholipase domain) | | |
| AAV VR-942n | 1165 | US20160289275A1 SEQ ID NO: 10 |
| AAV5-A (M569V) | 1166 | US20160289275A1 SEQ ID NO: 13 |
| AAV5-A (M569V) | 1167 | US20160289275A1 SEQ ID NO: 14 |
| AAV5-A (Y585V) | 1168 | US20160289275A1 SEQ ID NO: 16 |
| AAV5-A (Y585V) | 1169 | US20160289275A1 SEQ ID NO: 17 |
| AAV5-A (L587T) | 1170 | US20160289275A1 SEQ ID NO: 19 |
| AAV5-A (L587T) | 1171 | US20160289275A1 SEQ ID NO: 20 |
| AAV5-A (Y585V/L587T) | 1172 | US20160289275A1 SEQ ID NO: 22 |
| AAV5-A (Y585V/L587T) | 1173 | US20160289275A1 SEQ ID NO: 23 |
| AAV5-B (D652A) | 1174 | US20160289275A1 SEQ ID NO: 25 |
| AAV5-B (D652A) | 1175 | US20160289275A1 SEQ ID NO: 26 |
| AAV5-B (T362M) | 1176 | US20160289275A1 SEQ ID NO: 28 |
| AAV5-B (T362M) | 1177 | US20160289275A1 SEQ ID NO: 29 |
| AAV5-B (Q359D) | 1178 | US20160289275A1 SEQ ID NO: 31 |
| AAV5-B (Q359D) | 1179 | US20160289275A1 SEQ ID NO: 32 |
| AAV5-B (E350Q) | 1180 | US20160289275A1 SEQ ID NO: 34 |
| AAV5-B (E350Q) | 1181 | US20160289275A1 SEQ ID NO: 35 |
| AAV5-B (P533S) | 1182 | US20160289275A1 SEQ ID NO: 37 |
| AAV5-B (P533S) | 1183 | US20160289275A1 SEQ ID NO: 38 |
| AAV5-B (P533G) | 1184 | US20160289275A1 SEQ ID NO: 40 |
| AAV5-B (P533G) | 1185 | US20160289275A1 SEQ ID NO: 41 |
| AAV5-mutation in loop VII | 1186 | US20160289275A1 SEQ ID NO: 43 |
| AAV5-mutation in loop VII | 1187 | US20160289275A1 SEQ ID NO: 44 |
| AAV8 | 1188 | US20160289275A1 SEQ ID NO: 47 |
| Mut A (LK03/AAV8) | 1189 | WO2016181123A1 SEQ lD NO: 1 |
| Mut B (LK03/AAV5) | 1190 | WO2016181123A1 SEQ ID NO: 2 |
| Mut C (AAV8/AAV3B) | 1191 | WO2016181123A1 SEQ ID NO: 3 |
| Mut D (AAV5/AAV3B) | 1192 | WO2016181123A1 SEQ ID NO: 4 |
| Mut E (AAV8/AAV3B) | 1193 | WO2016181123A1 SEQ ID NO: 5 |
| Mut F (AAV3B/AAV8) | 1194 | WO2016181123A1 SEQ lD NO: 6 |
| AAV44.9 | 1195 | WO2016183297A1 SEQ ID NO: 4 |
| AAV44.9 | 1196 | WO2016183297A1 SEQ ID NO: 5 |
| AAVrh8 | 1197 | WO2016183297A1 SEQ ID NO: 6 |
| AAV44.9 (S470N) | 1198 | WO2016183297A1 SEQ ID NO: 9 |
| rh74 VP1 | 1199 | US20160375110A1 SEQ ID NO: 1 |
| AAV-LK03 (L125I) | 1200 | WO2017015102A1 SEQ ID NO: 5 |
| AAV3B (S663V + T492V) | 1201 | WO2017015102A1 SEQ ID NO: 6 |
| Anc80 | 1202 | WO2017019994A2 SEQ ID NO: 1 |
| Anc80 | 1203 | WO2017019994A2 SEQ ID NO: 2 |
| Anc81 | 1204 | WO2017019994A2 SEQ ID NO: 3 |
| Anc81 | 1205 | WO2017019994A2 SEQ ID NO: 4 |
| Anc82 | 1206 | WO2017019994A2 SEQ ID NO: 5 |
| Anc82 | 1207 | WO2017019994A2 SEQ ID NO: 6 |
| Anc83 | 1208 | WO2017019994A2 SEQ ID NO: 7 |
| Anc83 | 1209 | WO2017019994A2 SEQ ID NO: 8 |
| Anc84 | 1210 | WO2017019994A2 SEQ ID NO: 9 |
| Anc84 | 1211 | WO2017019994A2 SEQ ID NO: 10 |
| Anc94 | 1212 | WO2017019994A2 SEQ ID NO: 11 |
| Anc94 | 1213 | WO2017019994A2 SEQ ID NO: 12 |
| Anc113 | 1214 | WO2017019994A2 SEQ ID NO: 13 |
| Anc113 | 1215 | WO2017019994A2 SEQ ID NO: 14 |
| Anc126 | 1216 | WO2017019994A2 SEQ ID NO: 15 |
| Anc126 | 1217 | WO2017019994A2 SEQ ID NO: 16 |
| Anc127 | 1218 | WO2017019994A2 SEQ ID NO: 17 |
| Anc127 | 1219 | WO2017019994A2 SEQ ID NO: 18 |
| Anc80L27 | 1220 | WO2017019994A2 SEQ ID NO: 19 |
| Anc80L59 | 1221 | WO2017019994A2 SEQ ID NO: 20 |
| Anc80L60 | 1222 | WO2017019994A2 SEQ ID NO: 21 |
| Anc80L62 | 1223 | WO2017019994A2 SEQ ID NO: 22 |
| Anc80L65 | 1224 | WO2017019994A2 SEQ ID NO: 23 |
| Anc80L33 | 1225 | WO2017019994A2 SEQ ID NO: 24 |
| Anc80L36 | 1226 | WO2017019994A2 SEQ ID NO: 25 |
| Anc80L44 | 1227 | WO2017019994A2 SEQ ID NO: 26 |
| Anc80L1 | 1228 | WO2017019994A2 SEQ ID NO: 35 |
| Anc80L1 | 1229 | WO2017019994A2 SEQ ID NO: 36 |
| AAVrh10 | 1230 | WO2017019994A2 SEQ ID NO: 41 |
| Anc110 | 1231 | WO2017019994A2 SEQ ID NO: 42 |
| Anc110 | 1232 | WO2017019994A2 SEQ ID NO: 43 |
| AAVrh32.33 | 1233 | WO2017019994A2 SEQ ID NO: 45 |
| AAVrh74 | 1234 | WO2017049031A1 SEQ ID NO: 1 |
| AAV2 | 1235 | WO2017053629A2 SEQ ID NO: 49 |
| AAV2 | 1236 | WO2017053629A2 SEQ ID NO: 50 |
| AAV2 | 1237 | WO2017053629A2 SEQ ID NO: 82 |
| Parvo-like virus | 1238 | WO2017070476A2 SEQ ID NO: 1 |
| Parvo-like virus | 1239 | WO2017070476A2 SEQ ID NO: 2 |
| Parvo-like virus | 1240 | WO2017070476A2 SEQ ID NO: 3 |
| Parvo-like virus | 1241 | WO2017070476A2 SEQ ID NO: 4 |
| Parvo-like virus | 1242 | WO2017070476A2 SEQ ID NO: 5 |
| Parvo-like virus | 1243 | WO2017070476A2 SEQ ID NO: 6 |
| AAVrh.10 | 1244 | WO2017070516A1 SEQ ID NO: 7 |
| AAVrh.10 | 1245 | WO2017070516A1 SEQ ID NO: 14 |
| AAV2tYF | 1246 | WO2017070491A1 SEQ ID NO: 1 |
| AAV-SPK | 1247 | WO2017075619A1 SEQ ID NO:28 |
| AAV2.5 | 1248 | US20170128528A1 SEQ ID NO: 13 |
| AAV1.1 | 1249 | US20170128528A1 SEQ ID NO: 15 |
| AAV6.1 | 1250 | US20170128528A1 SEQ ID NO: 17 |
| AAV6.3.1 | 1251 | US20170128528A1 SEQ ID NO: 18 |
| AAV2i8 | 1252 | US20170128528A1 SEQ ID NO: 28 |
| AAV2i8 | 1253 | US20170128528A1 SEQ ID NO: 29 |
| ttAAV | 1254 | US20170128528A1 SEQ ID NO: 30 |
| ttAAV-S312N | 1255 | US20170128528A1 SEQ ID NO: 32 |
| ttAAV-S312N | 1256 | US20170128528A1 SEQ ID NO: 33 |
| AAV6 (Y705, Y731, and | 1257 | WO2016134337A1 SEQ ID NO: 24 |
| T492) | | |
| AAV2 | 1258 | WO2016134375A1 SEQ ID NO: 9 |
| AAV2 | 1259 | WO2016134375A1 SEQ ID NO: 10 |

[0152] The contents of each of the patents, applications, and/or publications listed in Table 1 are incorporated herein by reference in their entireties as related to AAV capsids, insofar as they do not conflict with the present disclosure.

[0153] In certain embodiments, the AAV serotype may be, or may comprise a sequence as described in International Patent Publication WO2015038958 (the content of which is incorporated herein by reference in its entirety as related to AAV capsids, insofar as it does not conflict with the present disclosure), such as, but not limited to, AAV9 (SEQ ID NO: 2 and 11 of WO2015038958 or SEQ ID NO: 135 and 136 herein), PHP.B (SEQ ID NO: 8 and 9 of WO2015038958, herein SEQ ID NO: 3 and 4), G2B-13 (SEQ ID NO: 12 of WO2015038958, herein SEQ ID NO: 5), G2B-26 (SEQ ID NO: 13 of WO2015038958, herein SEQ ID NO: 3), TH1.1-32 (SEQ ID NO: 14 of WO2015038958, herein SEQ ID NO: 6), TH1.1-35 (SEQ ID NO: 15 of WO2015038958, herein SEQ ID NO: 7), or variants thereof. Further, any of the “targeting peptides” or “amino acid inserts” (used herein interchangeably to mean sequences that may be inserted into an AAV capsid sequence to facilitate delivery to CNS tissue) described in WO2015038958, may be inserted into any parent AAV serotype, such as, but not limited to, AAV9 (SEQ ID NO: 135 for the DNA sequence and SEQ ID NO: 136 for the amino acid sequence). In certain embodiments, the amino acid insert is inserted between amino acids 586-592 of the parent AAV (e.g., AAV9), In certain embodiments, the amino acid insert is inserted between amino acids 588-589 of the parent AAV sequence. The amino acid insert may be, but is not limited to, any of the following amino acid sequences. TLAVPFK (SEQ ID NO: 1 of WO2015038958; herein SEQ ID NO: 1260), KFPVALT (SEQ ID NO: 3 of WO2015038958; herein SEQ ID NO: 1261), LAVPFK (SEQ ID NO: 31 of WO2015038958; herein SEQ ID NO: 1262), AVPFK (SEQ ID NO: 32 of WO2015038958; herein SEQ ID NO: 1263), VPFK (SEQ ID NO: 33 of WO2015038958; herein SEQ ID NO: 1264), TLAVPF (SEQ ID NO: 34 of WO2015038958; herein SEQ ID NO: 1265), TLAVP (SEQ ID NO: 35 of WO2015038958; herein SEQ ID NO: 1266), TLAV (SEQ ID NO: 36 of WO2015038958; herein SEQ ID NO: 1267), SVSKPFL (SEQ ID NO: 28 of WO2015038958; herein SEQ ID NO: 1268), FTLTTPK (SEQ ID NO: 29 of WO2015038958; herein SEQ ID NO: 1269), MNATKNV (SEQ ID NO: 30 of WO2015038958; herein SEQ ID NO: 1270), QSSQTPR (SEQ ID NO: 54 of WO2015038958; herein SEQ ID NO: 1271), ILGTGTS (SEQ ID NO: 55 of WO2015038958; herein SEQ ID NO: 1272), TRTNPEA (SEQ ID NO: 56 of WO2015038958; herein SEQ ID NO: 1273), NGGTSSS (SEQ ID NO: 58 of WO2015038958; herein SEQ ID NO: 1274), or YTLSQGW (SEQ ID NO: 60 of WO2015038958; herein SEQ ID NO: 1275). Non-limiting examples of nucleotide sequences that may encode the amino acid inserts comprise, but are not limited to, the following, AAGTTTCCTGTGGCGTTGACT (for SEQ ID NO: 3 of WO2015038958; herein SEQ ID NO: 1276), ACTTTGGCGGTGCCTTTTAAG (SEQ ID NO: 24 and 49 of WO2015038958; herein SEQ ID NO: 1277), AGTGTGAGTAAGCCTTTTTTG (SEQ ID NO: 25 of WO2015038958; herein SEQ ID NO: 1278), TTTACGTTGACGACGCCTAAG (SEQ ID NO: 26 of WO2015038958; herein SEQ ID NO: 1279), ATGAATGCTACGAAGAATGTG (SEQ ID NO: 27 of WO2015038958; herein SEQ ID NO: 1280), CAGTCGTCGCAGACGCCTAGG (SEQ ID NO: 48 of WO2015038958; herein SEQ ID NO: 1281)-.NTTCIGGGGACIGGIACTTCG (SEQ ID NO: 50 and 52 of WO2015038958; herein SEQ ID NO: 1282), ACGCGGACTAATCCTGAGGCT (SEQ ID NO: 51 of WO2015038958; herein SEQ ID NO: 1283), AATGGGGGGACTAGTAGTTCT (SEQ ID NO: 53 of WO2015038958; herein SEQ IL) NO: 1284), or TATACTTTGTCGCAGGGTTGG (SEQ ID NO: 59 of WO2015038958; herein SEQ ID NO: 1285).

[0154] In certain embodiments, the AAV serotype may be, or may comprise a sequence as described in International Patent Publication WO2017100671 (the content of which is incorporated herein by reference in its entirety as related to AAV capsids, insofar as it does not conflict with the present disclosure), such as, but not limited to, AAV9 K449R (SEQ ID NO: 45 of WO2017100671, herein SEQ ID NO: 9), PHP.N (SEQ ID NO: 46 of WO2017100671, herein SEQ NO: 2), PHP.S (SEQ ID NO: 47 of WO2017100671, herein SEQ ID NO: 8), or variants thereof. Further, any of the targeting peptides or amino acid inserts described in WO2017100671 may be inserted into any parent AAV serotype, such as, but not limited to, AAV9 (SEQ ID NO: 9 or SEQ ID NO: 136). In certain embodiments, the amino acid insert is inserted between amino acids 586-592 of the parent AAV (e.g., AAV9). In certain embodiments, the amino acid insert is inserted between amino acids 588-589 of the parent AAV sequence. The amino acid insert may be, but is not limited to, any of the following amino acid sequences, AQTLAVPFKAQ (SEQ ID NO: 1 of WO2017100671; herein SEQ ID NO: 1286), AQSVSKPFLAQ (SEQ ID NO: 2 of WO2017100671; herein SEQ ID NO: 1287)_{;} AQFTLTTPKAQ (SEQ ID NO: 3 in the sequence listing of WO2017100671; herein SEQ ID NO: 1288), DGTLAVPFKAQ (SEQ ID NO: 4 in the sequence listing of WO2017100671; herein SEQ ID NO: 1289), ESTIAVPFKAQ (SEQ ID NO: 5 of WO2017100671; herein SEQ ID NO: 1290), GGTLAVPFKAQ (SEQ ID NO: 6 of WO2017100671; herein SEQ ID NO: 1291), AQTLATPFKAQ (SEQ ID NO: 7 and 33 of WO2017100671; herein SEQ ID NO: 1292), ATTLATPFICAQ (SEQ ID NO: 8 of WO2017100671; herein SEQ ID NO: 1293), DGILATPFKAQ (SEQ ID NO: 9 of WO2017100671; herein SEQ ID NO: 1294), GGTLATPFKAQ (SEQ ID NO: 10 of WO2017100671; herein SEQ ID NO: 1295), SGSLAVPFKAQ (SEQ ID NO: 11 of WO2017100671; herein SEQ ID NO: 1296), AQTLAQPFKAQ (SEQ ID NO: 12 of WO2017100671; herein SEQ ID NO: 1297), AQTLQQPFKAQ (SEQ ID NO: 13 of WO2017100671; herein SEQ ID NO: 1298), AQTLSNPFKAQ (SEQ ID NO: 14 of WO2017100671; herein SEQ ID NO: 1299), AQTLAVPFSNP (SEQ ID NO: 15 of WO2017100671; herein SEQ ID NO: 1300), QGILAVPFKAQ (SEQ ID NO: 16 of WO2017100671; herein SEQ ID NO: 1301), NQTLAVPFKAQ (SEQ ID NO: 17 of WO2017100671; herein SEQ ID NO: 1302), EGSLAVPFKAQ (SEQ ID NO: 18 of WO2017100671; herein SEQ ID NO: 1303), SGNIAVPFKAQ (SEQ ID NO: 19 of WO2017100671; herein SEQ ID NO: 1304), EGTLAVPFKAQ (SEQ ID NO: 20 of WO2017100671; herein SEQ ID NO: 1305), DSTLAVPFKAQ (SEQ ID NO: 21 in Table 1 of WO2017100671; herein SEQ ID NO: 1306), AVTLAVPFKAQ (SEQ ID NO: 22 of WO2017100671; herein SEQ ID NO: 1307), AQTLPQPFKAQ (SEQ ID NO: 23 of WO2017100671; herein SEQ ID NO: 1308), AQTLPQPFKAQ (SEQ ID NO: 24 and 32 of WO2017100671; herein SEQ ID NO: 1309), AQTLSQPFKAQ (SEQ ID NO: 25 of WO2017100671; herein SEQ ID NO: 1310), AQTLQLPFKAQ (SEQ ID NO: 26 of WO2017100671; herein SEQ ID NO: 1311), AQTLIMPFKAQ (SEQ IL) NO: 27, and 34 of WO2017100671 and SEQ ID NO: 35 in the sequence listing of WO2017100671; herein SEQ ID NO: 1312), AQTLTTPFKAQ (SEQ ID NO: 28 of WO2017100671; herein SEQ ID NO: 1313), AQYTLSQGWAQ (SEQ ID NO: 29 of WO2017100671; herein SEQ ID NO: 1314), AQMNATKNVAQ (SEQ ID NO: 30 of WO2017100671; herein SEQ ID NO: 1315), AQVSGGHESAQ (SEQ ID NO: 31 of WO2017100671; herein SEQ ID NO: 1316), AQTLTTPFKAQ (SEQ ID NO: 35 in Table 1 of WO2017100671; herein SEQ ID NO: 1317), AQTLSKPFKAQ (SEQ ID NO: 36 of WO2017100671; herein SEQ ID NO: 1318), QAVRTSL (SEQ ID NO: 37 of WO2017100671; herein SEQ ID NO: 1319), YTLSQGW (SEQ ID NO: 38 of WO201.7100671.; herein SEQ ID NO: 1275), LAKERLS (SEQ ID NO: 39 of WO2017100671; herein SEQ ID NO: 1320), TLAVPFK (SEQ ID NO: 40 in the sequence listing of WO2017100671; herein SEQ ID NO: 1260), SVSKPFL (SEQ ID NO: 41 of WO2017100671; herein SEQ ID NO: 1268), FTLTTPK (SEQ ID NO: 42 of WO2017100671; herein SEQ ID NO: 1269), MNSTKNV (SEQ ID NO: 43 of WO2017100671; herein SEQ ID NO: 1321), VSGGHHS (SEQ ID NO: 44 of WO2017100671; herein SEQ ID NO: 1322), SAQTILAVPFKAQAQ (SEQ ID NO: 48 of WO2017100671; herein SEQ ID NO: 1323), SXXXLAVPFKAQAQ (SEQ ID NO: 49 of WO2017100671 wherein X may be any amino acid; herein SEQ ID NO: 1324), SAQXXXVPFKAQAQ (SEQ IL) NO: 50 of WO2017100671 wherein X may be any amino acid; herein SEQ ID NO: 1325), SAQTLXXXFKAQAQ (SEQ ID NO: 51 of WO2017100671 wherein X may be any amino acid; herein SEQ ID NO: 1326), SAQTLAVXXXAQAQ (SEQ ID NO: 52 of WO2017100671 wherein X may be any amino acid; herein SEQ ID NO: 1327), SAQTLAVPFXXXAQ (SEQ ID NO: 53 of WO2017100671 wherein X may be any amino acid; herein SEQ ID NO: 1328), TNHQSAQ (SEQ ID NO: 65 of WO2017100671; herein SEQ ID NO: 1329), AQAQTGW (SEQ ID NO: 66 of WO2017100671; herein SEQ ID NO: 1330), DGTLATPFK (SEQ ID NO: 67 of WO2017100671; herein SEQ ID NO: 1331), DGTLATPFKXX (SEQ ID NO: 68 of WO2017100671 wherein X may be any amino acid; herein SEQ ID NO: 1332), LAVPFKAQ (SEQ ID NO: 80 of WO2017100671; herein SEQ ID NO: 1333), VPFKAQ (SEQ ID NO: 81 of WO201.7100671; herein SEQ ID NO: 1334), FKAQ (SEQ ID NO: 82 of WO2017100671; herein SEQ ID NO: 1335), AQTLAV (SEQ ID NO: 83 of WO2017100671; herein SEQ ID NO: 1336), AQTLAVPF (SEQ m NO: 84 of WO2017100671; herein SEQ ID NO: 1337), QAVR (SEQ ID NO: 85 of WO2017100671; herein SEQ ID NO: 1338), AVRT (SEQ ID NO: 86 of WO2017100671; herein SEQ ID NO: 1339), VRTS (SEQ ID NO: 87 of WO2017100671; herein SEQ ID NO: 1340), RTSI, (SEQ ID NO: 88 of WO2017100671; herein SEQ ID NO: 1341), QAVRT (SEQ ID NO: 89 of WO2017100671; herein SEQ ID NO: 1342), AVRTS (SEQ ID NO: 90 of WO2017100671; herein SEQ ID NO: 1343), VRTSL (SEQ ID NO: 91 of WO2017100671; herein SEQ ID NO: 1344), QAVRTS (SEQ NO: 92 of WO2017100671; herein SEQ ID NO: 1345), or AVRTSI, (SEQ ID NO: 93 of WO2017100671; herein SEQ ID NO: 1346).

[0155] Non-limiting examples of nucleotide sequences that may encode the amino acid inserts comprise the following, GATGGGACTTTGGCGGTGCCTTTTAAGGCACAG (SEQ ID NO: 54 of WO2017100671; herein SEQ ID NO: 1347), GATGGGACGTTGGCGGTGCCITITAAGGCACAG (SEQ ID NO: 55 of WO2017100671; herein SEQ ID NO: 1348), CAGGCGGITAGGACGICTIT (SEQ NO: 56 of WO2017100671; herein SEQ ID NO: 1349), CAGGTCTTCACGGACTCAGACTATCAG (SEQ ID NO: 57 and 78 of WO2017100671; herein SEQ ID NO: 1350), CAAGTAAAACCTCTACAAAIGTGGTAAAATCG (SEQ ID NO: 58 of WO2017100671; herein SEQ ID NO: 1351); ACTCATCGACCAATACTTGTACTATCTCTCTAGAAC (SEQ ID NO: 59 of WO2017100671; herein SEQ ID NO: 1352), GGAAGTATICCTIGGTTTTGAACCCA (SEQ ID NO: 60 of 402017100671; herein SEQ ID NO: 1353), GGTCGCGGTTCTTGTTTGTGGAT (SEQ ID NO: 61 of WO2017100671; herein SEQ ID NO: 1354). CGACCTTGAAGCGCATGAACTCCT (SEQ ID NO: 62 of WO2017100671; herein SEQ ID NO: 1355), GTATTCCTTGGTTTTGAACCCAACCGGTCTGCGCCTGTGCMNNMNNMNNMNNM NNMNNMNNTTGGGCACTCTGGTGGTTTGTG (SEQ ID NO: 63 of WO2017100671 wherein N may be A, C, T, or G; herein SEQ ID NO: 1356), GTATTCCTTGGTFITGAACCCAACCGGTCTGCGCMNNMNNMNNAAAAGGCACCG CCAAAGTTTG (SEQ ID NO: 69 of WO2017100671 wherein N may he A, C, T, or G; herein SEQ ID NO: 1357), GTATTCCTTGGTTTTGAACCCAACCGGTCTGCGCCTGTGCMNNMNNMNNCACCG CCAAAGTTTGGGCACT (SEQ ID NO: 70 of WO2017100671 wherein N may be A, C, T, or G; herein SEQ ID NO: 1358), GTACCTTGGTTTTGAACCCAACCGGICTGCGCCTGTGCCTTAAAMNNNINNMN NCAAAGTTTGGGCACTCTGGTGG (SEQ ID NO: 71 of WO2017100671 wherein N may be A, C, T, or G; herein SEQ ID NO: 1359), GTATTCCTTGGTTTI GAACCCAACCGGTCTGCGCCTUTGCCTTAAAAGGCACMNN MNNMNNTTGGGCACTCTGGTGGTITGTG (SEQ ID NO: 72 of WO2017100671 wherein N may be A, C, T, or G; herein SEQ ID NO: 1360), ACTTIGGCGGTGCCTTTTAAG (SEQ ID NO: 74 of WO2017100671; herein SEQ ID NO: 1277), AGTGTGAGTAAGCCTTTTTTG (SEQ ID NO: 75 of WO2017100671; herein SEQ ID NO: 1278), TTTACGTTGACGACGCCTAAG (SEQ ID NO: 76 of WO2017100671; herein SEQ ID NO: 1279), TATACTTTGTCGCAGGGTTGG (SEQ ID NO: 77 of WO2017100671; herein SEQ ID NO: 1285), or CTTGCGAAGGAGCGGCTI TCG (SEQ ID NO: 79 of WO2017100671; herein SEQ ID NO: 1361).

[0156] In certain embodiments, the AAV serotype may be, or may comprise a sequence as described in U.S. Pat. No. 9,624,274 (the content of which is incorporated herein by reference in its entirety as related to AAV capsids, insofar as it does not conflict with the present disclosure), such as, but not limited to, AAV1 (SEQ ID NO: 181 of U.S. Pat. No. 9,624,274), AAV6 (SEQ ID NO: 182 of U.S. Pat. No. 9,624,274), AAV2 (SEQ ID NO: 183 of U.S. Pat. No. 9,624,274), AAV3b (SEQ ID NO: 184 of U.S. Pat. No. 9,624,274), AAV7 (SEQ ID NO: 185 of U.S. Pat. No. 9,624,274), AAV8 (SEQ ID NO: 186 of U.S. Pat. No. 9,624,274), AAV10 (SEQ ID NO: 187 of U.S. Pat. No. 9,624,274), AAV4 (SEQ ID NO: 188 of U.S. Pat. No. 9,624,274), AAV11(SEQ ID NO: 189 of U.S. Pat. No. 9,624,274), bAAV (SEQ ID NO: 190 of U.S. Pat. No. 9,624,274), AAV5 (SEQ ID NO: 191 of U.S. Pat. No. 9,624,274), GPV (SEQ ID NO: 192 of U.S. Pat. No. 9,624,274; herein SEQ ID NO: 992), B19 (SEQ ID NO: 193 of U.S. Pat. No. 9,624,274; herein SEQ ID NO: 993), MVM (SEQ ID NO: 194 of U.S. Pat. No. 9,624,274; herein SEQ ID NO: 994), FPV (SEQ ID NO: 195 of U.S. Pat. No. 9,624,274, herein SEQ ID NO: 995), CPV (SEQ ID NO: 196 of U.S. Pat. No. 9,624,274; herein SEQ NO: 996) or variants thereof. Further, any of the structural protein inserts described in U.S. Pat. No. 9,624,274, may be inserted into, but not limited to, 1-453 and 1-587 of any parent AAV serotype, such as, but not limited to, AAV2 (SEQ ID NO: 183 of U.S. Pat. No. 9,624,274). The amino acid insert may be, but is not limited to, any of the following amino acid sequences, VNLTWSRASG (SEQ ID NO: 50 of U.S. Pat. No. 9,624,274; herein SEQ ID NO: 1362), EFCIINHRGYWVCGD (SEQ ID No. 55 of U.S. Pat. No. 9,624,274; herein SEQ ID NO: 1363), EDGQVMDVDLS (SEQ ID NO: 85 of U.S. Pat. No. 9,624,274; herein SEQ ID NO: 1364), EKQRNGTLT (SEQ ID NO: 86 of U.S. Pat. No. 9,624,274; herein SEQ ID NO: 1365), TYKRNITHPHLPRALMR (SEQ ID NO: 87 of U.S. Pat. No. 9,624,274; herein SEQ ID NO: 1366), RHSTTQPRKTKGSG (SEQ ID NO: 88 of U.S. Pat. No. 9,624,274; herein SEQ ID NO: 1367), DSNPRGVSAYLSR (SEQ ID NO: 89 of U.S. Pat. No. 9,624,274; herein SEQ ID NO: 1368), TITCLWDLAPSK (SEQ ID NO: 90 of U.S. Pat. No. 9,624,274; herein SEQ ID NO: 1369), KTKGSGEFVF (SEQ ID NO: 91 of U.S. Pat. No. 9,624,274; herein SEQ ID NO: 1370), THPHLPRALMRS (SEQ ID NO: 92 of U.S. Pat. No. 9,624,274; herein SEQ ID NO: 1371), GETYKRVIEIPHLPRALMRSTIK (SEQ ID NO: 93 of U.S. Pat. No. 9624274, herein SEQ ID NO: 1372), LPRALMRS (SEQ ID NO: 94 of U.S. Pat. No. 9,624,274; herein SEQ ID NO: 1373), INHRGYWV (SEQ ID NO: 95 of U.S. Pat. No. 9,624,274; herein SEQ ID NO: 1374), CDAGSVRTNAPD (SEQ ID NO: 60 of U.S. Pat. No. 9,624,274; herein SEQ ID NO: 1375), AKAVSNLTESRSESLQS (SEQ ID NO: 96 of U.S. Pat. No. 9,624,274; herein SEQ ID NO: 1376), SLTGDEFKKVLET (SEQ ID NO: 97 of U.S. Pat. No. 9,624,274; herein SEQ ID NO: 1377), REAVAYRFEED (SEQ ID NO: 98 of U.S. Pat. No. 9,624,274; herein SEQ ID NO: 1378). INPEIFFLDG (SEQ ID NO: 99 of U.S. Pat. No. 9,624,274; herein SEQ NO: 1379), DISVIGAPVITATYL (SEQ ID NO: 100 of U.S. Pat. No. 9,624,274; herein SEQ ID NO: 1380), DISVTGAPVITA (SEQ ID NO: 101 of U.S. Pat. No. 9,624,274; herein SEQ ID NO: 1381), PKTVSNLTESSSESVQS (SEQ ID NO: 102 of U.S. Pat. No. 9,624,274; herein SEQ ID NO: 1382), SLNIGDEFICWLET (SEQ ID NO: 103 of U.S. Pat. No. 9,624,274; herein SEQ ID NO: 1383), QHSVAYTFEED (SEQ ID NO: 104 of U.S. Pat. No. 9,624,274; herein SEQ ID NO: 1384), INPEIITRDG (SEQ ID NO: 105 of U.S. Pat. No. 9,624,274; herein SEQ ID NO: 1385), DISLTGDPVITASYL (SEQ ID NO: 106 of U.S. Pat. No. 9,624,274; herein SEQ ID NO: 1386), DISLIGDPVITA (SEQ ID NO: 107 of U.S. Pat. No. 9,624,274, herein SEQ ID NO: 1387). DQSIDFEIDSA (SEQ ID NO: 108 of U.S. Pat. No. 9,624,274; herein SEQ ID NO: 1388), KNVSEDLPLPTFSPTLLGDS (SEQ ID NO: 109 of U.S. Pat. No. 9,624,274; herein SEQ ID NO: 1389), KNVSEDLPLPT (SEQ ID NO: 110 of U.S. Pat. No. 9,624,274; herein SEQ ID NO: 1390), CDSGRVRTDAPD (SEQ ID NO: 111 of U.S. Pat. No. 9,624,274; herein SEQ ID NO: 1391). FPEFILINDELQSLS (SEQ ID NO: 112 of U.S. Pat. No. 9,624,274; herein SEQ ID NO: 1392), DAEFRHDSG (SEQ ID NO: 65 of U.S. Pat. No. 9,624,274; herein SEQ ID NO: 1393), HYAAAQWDFGNTMCQL (SEQ ID NO: 113 of U.S. Pat. No. 9,624,274; herein SEQ ID NO: 1394), YAAQWDFGNTMCQ (SEQ ID NO: 114 of U.S. Pat. No. 9,624,274; herein SEQ ID NO: 1395), RSQKEGLHYT (SEQ ID NO: 115 of U.S. Pat. No. 9,624,274; herein SEQ ID NO: 1396), SSRTPSDKIWAHWANPQAE (SEQ ID NO: 116 of U.S. Pat. No. 9,624,274; herein SEQ ID NO: 1397), SRTPSDKINAHWANP (SEQ ID NO: 117 of U.S. Pat. No. 9,624,274; herein SEQ ID NO: 1398), SSRTPSDKP (SEQ ID NO: 118 of U.S. Pat. No. 9,624,274; herein SEQ ID NO: 1399), NADGNVDYHMNSVP (SEQ ID NO: 119 of U.S. Pat. No. 9,624,274; herein SEQ ID NO: 1400), DGNVDYHMNSV (SEQ ID NO: 120 of U.S. Pat. No. 9,624,274; herein SEQ ID NO: 1401), RSFKEFLQSSLRALRQ (SEQ ID NO: 121 of U.S. Pat. No. 9,624,274; herein SEQ ID NO: 1402); FKEFLQSSLRA (SEQ ID NO: 122 of U.S. Pat. No. 9,624,274; herein SEQ ID NO: 1403), or QMWAPQWGPD (SEQ ID NO: 123 of U.S. Pat. No. 9,624,274; herein SEQ ID NO: 1404).

[0157] In certain embodiments, the AAV serotype may be, or may have a sequence as described in U.S. Pat. No. 9,475,845 (the content of which is incorporated herein by reference in its entirety as related to AAV capsids, insofar as it does not conflict with the present disclosure), such as, but not limited to, AAV capsid proteins comprising modification of one or more amino acids at amino acid positions 585 to 590 of the native AAV2 capsid protein. Further the modification may result in, but not limited to, the amino acid sequence RGNRQA (SEQ ID NO: 3 of U.S. Pat. No. 9,475,845; herein SEQ ID NO: 1405), SSSTDP (SEQ ID NO: 4 of U.S. Pat. No. 9,475,845, herein SEQ ID NO: 1406), SSNTAP (SEQ ID NO: 5 of U.S. Pat. No. 9,475,845; herein SEQ ID NO: 1407), SNSNLP (SEQ ID NO: 6 of U.S. Pat. No. 9,475,845; herein SEQ ID NO: 1408), SSTTAP (SEQ ID NO: 7 of U.S. Pat. No. 9,475,845; herein SEQ ID NO: 1409), AANTAA (SEQ ID NO: 8 of U.S. Pat. No. 9,475,845; herein SEQ ID NO: 1410), QQNTAP (SEQ ID NO: 9 of U.S. Pat. No. 9,475,845; herein SEQ ID NO: 1411), SAQAQA (SEQ ID NO: 10 of U.S. Pat. No. 9,475,845; herein SEQ ID NO: 1412), QANTGP (SEQ NO: 11 of U.S. Pat. No. 9,475,845; herein SEQ ID NO: 1413), NATTAP (SEQ ID NO: 12 of U.S. Pat. No. 9,475,845; herein SEQ ID NO: 1414), SSTAGP (SEQ ID NO: 13 and 20 of U.S. Pat. No. 9,475,845; herein SEQ ID NO: 1415), QQNTAA (SEQ ID NO: 14 of U.S. Pat. No. 9,475,845; herein SEQ ID NO: 1416). PSTAGP (SEQ ID NO: 15 of U.S. Pat. No. 9,475,845; herein SEQ ID NO: 1417), NQNTAP (SEQ ID NO: 16 of U.S. Pat. No. 9,475,845; herein SEQ ID NO: 1418), QAANAP (SEQ ID NO: 17 of U.S. Pat. No. 9,475,845; herein SEQ ID NO: 1419), SIVGLP (SEQ ID NO: 18 of U.S. Pat. No. 9,475,845; herein SEQ ID NO: 1420), AASTAA (SEQ ID NO: 19, and 27 of U.S. Pat. No. 9,475,845; herein SEQ ID NO: 1421), SQNTTA. (SEQ ID NO: 21 of U.S. Pat. No. 9,475,845; herein SEQ ID NO: 1422), QQDTAP (SEQ ID NO: 22 of U.S. Pat. No. 9,475,845; herein SEQ ID NO: 1423), QTNTGP (SEQ ID NO: 23 of U.S. Pat. No. 9,475,845; herein SEQ ID NO: 1424), QTNGAP (SEQ ID NO: 24 of U.S. Pat. No. 9,475,845; herein SEQ ID NO: 1425), QQNAAP (SEQ ID NO: 25 of U.S. Pat. No. 9,475,845; herein SEQ ID NO: 1426), or AANTQA (SEQ ID NO: 26 of U.S. Pat. No. 9,475,845; herein SEQ ID NO: 1427). In certain embodiments, the amino acid modification is a substitution at amino acid positions 262 through 265 in the native AAV2 capsid protein or the corresponding position in the capsid protein of another AAV with a targeting; sequence. The targeting sequence may be, but is not limited to, any of the amino acid sequences NGRAHA (SEQ ID NO: 38 of U.S. Pat. No. 9,475,845; herein SEQ ID NO: 1428), QPEHSST (SEQ ID NO: 39 and 50 of U.S. Pat. No. 9,475,845, herein SEQ ID NO: 1429), VNTANST (SEQ ID NO: 40 of U.S. Pat. No. 9,475,845; herein SEQ NO: 1430), HGPMQKS (SEQ ID NO: 41 of U.S. Pat. No. 9,475,845; herein SEQ ID NO: 1431), PHKPPLA (SEQ ID NO: 42 of U.S. Pat. No. 9,475,845; herein SEQ ID NO: 1432), IKNNEMW (SEQ ID NO: 43 of U.S. Pat. No. 9,475,845; herein SEQ ID NO: 1433), RNLDTPM (SEQ ID NO: 44 of U.S. Pat. No. 9,475,845; herein SEQ ID NO: 1434), VDSHRQS (SEQ ID NO: 45 of U.S. Pat. No. 9,475,845; herein SEQ ID NO: 1435), YDSKIKT (SEQ NO: 46 of U.S. Pat. No. 9,475,845; herein SEQ ID NO: 1436), SQLPHQK (SEQ ID NO: 47 of U.S. Pat. No. 9,475,845; herein SEQ ID NO: 1437), STMQQNT (SEQ ID NO: 48 of U.S. Pat. No. 9,475,845; herein SEQ ID NO: 1438). TERYMTQ (SEQ ID NO: 49 of U.S. Pat. No. 9,475,845; herein SEQ ID NO: 1439), DASLSTS (SEQ ID NO: 51 of U.S. Pat. No. 9,475,845; herein SEQ ID NO: 1440), DLPNKKT (SEQ ID NO: 52 of U.S. Pat. No. 9,475,845; herein SEQ ID NO: 1441), DLTAARL (SEQ ID NO: 53 of U.S. Pat. No. 9,475,845; herein SEQ ID NO: 1442), EPHQFNY (SEQ ID NO: 54 of U.S. Pat. No. 9,475,845; herein SEQ ID NO: 1443), EPQSNHT (SEQ ID NO: 55 of U.S. Pat. No. 9,475,845; herein SEQ ID NO: 1444), MSSWPSQ (SEQ ID NO: 56 of U.S. Pat. No. 9,475,845; herein SEQ ID NO: 1445), NPKHNAT (SEQ ID NO: 57 of U.S. Pat. No. 9,475,845; herein SEQ ID NO: 1446), PDGMRTT (SEQ ID NO: 58 of U.S. Pat. No. 9,475,845; herein SEQ ID NO: 1447), PNNNKTT (SEQ ID NO: 59 of U.S. Pat. No. 9,475,845; herein SEQ ID NO: 1448), QSTTHDS (SEQ ID NO: 60 of U.S. Pat. No. 9,475,845; herein SEQ ID NO: 1449), TGSKQKQ (SEQ ID NO: 61 of U.S. Pat. No. 9,475,845; herein SEQ ID NO: 1450), SLKHQAL (SEQ ID NO: 62 of U.S. Pat. No. 9,475,845; herein SEQ ID NO: 1451), SPIDGEQ (SEQ ID NO: 63 of U.S. Pat. No. 9,475,845; herein SEQ ID NO: 1452), WIFPWIQL (SEQ ID NO: 64 and 112 of U.S. Pat. No. 9,475,845; herein SEQ ID NO: 1453), CDCRGDCFC (SEQ ID NO: 65 of U.S. Pat. No. 9,475,845; herein SEQ ID NO: 1454), CNGRC (SEQ ID NO: 66 of U.S. Pat. No. 9,475,845; herein SEQ ID NO: 1455), CPRECES (SEQ ID NO: 67 of U.S. Pat. No. 9,475,845; herein SEQ ID NO: 1456), CTTHWGFTLC (SEQ ID NO: 68 and 123 of U.S. Pat. No. 9,475,845; herein SEQ ID NO: 1457), CGRRAGGSC (SEQ ID NO: 69 of U.S. Pat. No. 9,475,845; herein SEQ ID NO: 1458). CKGGRAKDC (SEQ ID NO: 70 of U.S. Pat. No. 9,475,845; herein SEQ ID NO: 1459), CVPELGHEC (SEQ ID NO: 71 and 115 of U.S. Pat. No. 9,475,845; herein SEQ ID NO: 1460), CRRETAWAK (SEQ ID NO: 72 of U.S. Pat. No. 9,475,845; herein SEQ ID NO: 1461), VSWFSHRYSPFAVS (SEQ ID NO: 73 of U.S. Pat. No. 9,475,845; herein SEQ ID NO: 1462), GYRDGYAGPILYN (SEQ ID NO: 74 of U.S. Pat. No. 9,475,845; herein SEQ ID NO: 1463), XXXYXXX (SEQ ID NO: 75 of U.S. Pat. No. 9,475,845; herein SEQ ID NO: 1464), YXNW (SEQ ID NO: 76 of U.S. Pat. No. 9,475,845; herein SEQ ID NO: 1465), RPLPPLP (SEQ ID NO: 77 of U.S. Pat. No. 9,475,845; herein SEQ ID NO: 1466), APPLPPR (SEQ NO: 78 of U.S. Pat. No. 9,475,845; herein SEQ ID NO: 1467), DVFYPYPYASGS (SEQ ID NO: 79 of U.S. Pat. No. 9,475,845; herein SEQ ID NO: 1468), MYWYPY (SEQ ID NO: 80 of U.S. Pat. No. 9,475,845; herein SEQ ID NO: 1469), DITWDQLWDLMK (SEQ ID NO: 81 of U.S. Pat. No. 9,475,845; herein SEQ ID NO: 1470), CWDDXWLC (SEQ ID NO: 82 of U.S. Pat. No. 9,475,845; herein SEQ ID NO: 1471), EWCEYLGGYLRCYA (SEQ ID NO: 83 of U.S. Pat. No. 9,475,845; herein SEQ ID NO: 1472), YXCXXGPXTWXCXP (SEQ ID NO: 84 of U.S. Pat. No. 9,475,845; herein SEQ ID NO: 1473), IEGPTLRQWLAARA (SEQ ID NO: 85 of U.S. Pat. No. 9,475,845; herein SEQ ID NO: 1474), LWXXX (SEQ ID NO: 86 of U.S. Pat. No. 9,475,845; herein SEQ NO: 1475), XFXXY LW (SEQ ID NO: 87 of U.S. Pat. No. 9,475,845; herein SEQ ID NO: 1476), SSIISHFRWGLCD (SEQ ID NO: 88 of U.S. Pat. No. 9,475,845; herein SEQ ID NO: 1477), MSRPACPPNDKYE (SEQ ID NO: 89 of U.S. Pat. No. 9,475,845; herein SEQ ID NO: 1478), CLRSGRGC (SEQ ID NO: 90 of U.S. Pat. No. 9,475,845; herein SEQ ID NO: 1479), CHWMFSPWC (SEQ ID NO: 91 of U.S. Pat. No. 9,475,845; herein SEQ ID NO: 1480), WXXF (SEQ ID NO: 92 of U.S. Pat. No. 9,475,845; herein SEQ ID NO: 1481), CSSRLDAC (SEQ ID NO: 93 of U.S. Pat. No. 9,475,845; herein SEQ ID NO: 1482), CLPVASC (SEQ ID NO: 94 of U.S. Pat. No. 9,475,845; herein SEQ ID NO: 1483). CGFECVRQCPERC (SEQ NO: 95 of U.S. Pat. No. 9,475,845; herein SEQ ID NO: 1484), CVALCREACGEGC (SEQ ID NO: 96 of U.S. Pat. No. 9,475,845; herein SEQ ID NO: 1485), SWCEPGWCR (SEQ ID NO: 97 of U.S. Pat. No. 9,475,845; herein SEQ ID NO: 1486), YSGKWGW (SEQ ID NO: 98 of U.S. 9,475,845; herein SEQ ID NO: 1487), GLSGGRS (SEQ ID NO: 99 of U.S. Pat. No. 9,475,845; herein SEQ ID NO: 1488), LMLPRAD (SEQ ID NO: 100 of U.S. Pat. No. 9,475,845; herein SEQ ID NO: 1489), CSCFRDVCC (SEQ ID NO: 101 of U.S. Pat. No. 9,475,845; herein SEQ ID NO: 1490), CRDVVSVIC (SEQ ID NO: 102 of U.S. Pat. No. 9,475,845; herein SEQ NO: 1491), MARSGL (SEQ ID NO: 103 of U.S. Pat. No. 9,475,845; herein SEQ ID NO: 1492), MARAKE (SEQ ID NO: 104 of U.S. Pat. No. 9,475,845; herein SEQ ID NO: 1493), MSRTMS (SEQ ID NO: 105 of U.S. Pat. No. 9,475,845; herein SEQ ID NO: 1494), KCCYSL (SEQ ID NO: 106 of U.S. Pat. No. 9,475,845; herein SEQ ID NO: 1495). MYWGDSHWLQYWYE (SEQ ID NO: 107 of U.S. Pat. No. 9,475,845; herein SEQ ID NO: 1496), MQLPLAT (SEQ ID NO: 108 of U.S. Pat. No. 9,475,845; herein SEQ ID NO: .1497), EWLS (SEQ ID NO: 109 of U.S. Pat. No. 9,475,845; herein SEQ ID NO: 1498), SNEW (SEQ ID NO: 110 of U.S. Pat. No. 9,475,845; herein SEQ ID NO: 1499), TNYL (SEQ ID NO: 111 of U.S. Pat. No. 9,475,845; herein SEQ ID NO: 1500), WDILAWMERLPVG (SEQ ID NO: 113 of U.S. Pat. No. 9,475,845; herein SEQ ID NO: 1501). CTVALPGGYVRVC (SEQ ID NO: 114 of U.S. Pat. No. 9,475,845; herein SEQ ID NO: 1502), CVAYCIEHHCWIC (SEQ ID NO: 116 of U.S. Pat. No. 9,475,845; herein SEQ ID NO: 1503), CVFAHNYDYLVC (SEQ ID NO: 117 of U.S. Pat. No. 9,475,845; herein SEQ ID NO: 1504), CVFTSNYAFC (SEQ NO: 118 of U.S. Pat. No. 9,475,845; herein SEQ ID NO: 1505), VHSPNKK (SEQ ID NO: 119 of U.S. Pat. No. 9,475,845; herein SEQ ID NO: 1506), CRGDGWC (SEQ ID NO: 120 of U.S. Pat. No. 9,475,845; herein SEQ ID NO: 1507), XRGCDX (SEQ ID NO: 121 of U.S. Pat. No. 9,475,845; herein SEQ ID NO: 1508), PXXX (SEQ ID NO: 122 of U.S. Pat. No. 9,475,845; herein SEQ ID NO: 1509), SGKGPRQITAL (SEQ NO: 124 of U.S. Pat. No. 9,475,845; herein SEQ ID NO: 1510), AAAAAAAAAXXXXX (SEQ ID NO: 125 of U.S. Pat. No. 9,475,845; herein SEQ ID NO: 1511), VYMSPF (SEQ ID NO: 126 of U.S. Pat. No. 9,475,845; herein SEQ ID NO: 1512), ATWLPPR (SEQ ID NO: 127 of U.S. Pat. No. 9,475,845; herein SEQ ID NO: 1513), HIMYYHEIIQHEL (SEQ ID NO: 128 of U.S. Pat. No. 9,475,845; herein SEQ ID NO: 1514), SEVGCRAGPLQWLCEKYFG (SEQ ID NO: 129 of U.S. Pat. No. 9,475,845; herein SEQ ID NO: 1515), CGLLPVGRPDRNVWRWLC (SEQ ID NO: 130 of U.S. Pat. No. 9,475,845; herein SEQ ID NO: 1516), CKGQCDRFKGLPWEC (SEQ ID NO: 131 of U.S. Pat. No. 9,475,845; herein SEQ ID NO: 1517), SGRSA (SEQ ID NO: 132 of U.S. Pat. No. 9,475,845; herein SEQ ID NO: 1518), WGFP (SEQ ID NO: 133 of U.S. Pat. No. 9,475,845; herein SEQ ID NO: 1519), AEPMPFISLNFSQYLWYT (SEQ ID NO: 134 of U.S. Pat. No. 9,475,845; herein SEQ ID NO: 1520), WAYXSP (SEQ ID NO: 135 of U.S. Pat. No. 9,475,845; herein SEQ ID NO: 1521), IELLQAR (SEQ ID NO: 136 of U.S. Pat. No. 9,475,845; herein SEQ ID NO: 1522), AYTKCSRQWRTCMTTII (SEQ ID NO: 137 of U.S. Pat. No. 9,475,845; herein SEQ ID NO: 1523), PQNSKIPGPTFLDPH (SEQ ID NO: 138 of U.S. Pat. No. 9,475,845; herein SEQ ID NO: 1524), SMEPALPDWWWKNIFK (SEQ ID NO: 139 of U.S. Pat. No. 9,475,845; herein SEQ ID NO: 1525), NNTPCGPYTHDCPVKR (SEQ ID NO: 140 of U.S. Pat. No. 9,475,845; herein SEQ ID NO: 1526), TACHQFIVRNIVRP (SEQ ID NO: 141 of U.S. Pat. No. 9,475,845; herein SEQ ID NO: 1527), VPWMEPAYQRFL (SEQ ID NO: 142 of U.S. Pat. No. 9,475,845; herein SEQ ID NO: 1528), DPRATPGS (SEQ ID NO: 143 of U.S. Pat. No. 9,475,845; herein SEQ ID NO: 1529), FRPNRAQDYNTN (SEQ ID NO: 144 of U.S. Pat. No. 9,475,845; herein SEQ ID NO: 1530), CTKNSYLMC (SEQ ID NO: 145 of U.S. Pat. No. 9,475,845; herein SEQ ID NO: 1531), CXXTXXXGXGC (SEQ ID NO: 146 of U.S. Pat. No. 9,475,845; herein SEQ ID NO: 1532), CPIEDRPMC (SEQ ID NO: 147 of U.S. Pat. No. 9,475,845; herein SEQ ID NO: 1533), FIEWSYLAPYPWF (SEQ ID NO: 148 of U.S. Pat. No. 9,475,845; herein SEQ ID NO: 1534). MCPKEPLGC (SEQ ID NO: 149 of U.S. Pat. N9o. 9,475,845; herein SEQ ID NO: 1535), RMWPSSTVNLSAGRR (SEQ ID NO: 150 of U.S. Pat. No. 9,475,845; herein SEQ ID NO: 1536), SAKTAVSQRVWLPSFIRGGEP (SEQ ID NO: 151 of U.S. Pat. No. 9,475,845; herein SEQ ID NO: 1537), KSREIIVNNSACPSKRITAAL (SEQ ID NO: 152 of U.S. Pat. No. 9,475,845; herein SEQ ID NO: 1538), EGFR (SEQ ID NO: 153 of U.S. Pat. No. 9,475,845; herein SEQ ID NO: 1539), AGLGVR (SEQ IL) NO: 154 of U.S. Pat. No. 9,475,845; herein SEQ ID NO: 1540), GTRQGHTMRLGVSDG (SEQ ID NO: 155 of 059475845; herein SEQ ID NO: 1541), IAGLATPGWSHWLAL (SEQ ID NO: 156 of U.S. Pat. No. 9,475,845; herein SEQ ID NO: 1542), SMSIARL (SEQ ID NO: 157 of U.S. Pat. No. 9,475,845; herein SEQ ID NO: 1543), HTFEPGV (SEQ ID NO: 158 of U.S. Pat. No. 9,475,845; herein SEQ ID NO: 1544), NTSLKRISNKRIRRK (SEQ ID NO: 159 of U.S. Pat. No. 9,475,845; herein SEQ ID NO: 1545), LRIKRKRRKRKKTRK (SEQ ID NO: 160 of U.S. Pat. No. 9,475,845; herein SEQ ID NO: 1546), GGG, GFS, DVS, EGG, LLV, LSP, LBS, AGG, GRR, GGH, or GTV.

[0158] In certain embodiments, the AAV serotype may be, or may have a sequence as described in U.S. Patent Application Publication No. US 20160369298 (the content of which is incorporated herein by reference in its entirety as related to AAV capsids, insofar as it does not conflict with the present disclosure), such as, but not limited to, site-specific mutated capsid protein of AAV2 (SEQ ID NO: 97 of US 20160369298; herein SEQ ID NO: 1547) or variants thereof, wherein the specific mutated site is at least one site selected from sites R447, G453, 5578, N587, N587+1, S662 of VP1 or fragment thereof.

[0159] Further, any of the mutated sequences described in US 20160369298, may be or may have, but not limited to, any of the following; sequences: SDSGASN (SEQ ID NO: 1 and. SEQ ID NO: 231 of US20160369298; herein SEQ m NO: 1548), SPSGASN (SEQ ID NO: 2 of US20160369298; herein SEQ ID NO: 1549), SHSGASN (SEQ :113 NO: 3 of US20160369298; herein SEQ ID NO: 1550), SRSGASN (SEQ IL) NO: 4 of US20160369298, herein SEQ ID NO: 1551), SKSGASN (SEQ ID NO: 5 of US20160369298; herein SEQ ID NO: 1552), SNSGASN (SEQ ID NO: 6 of US20160369298; herein SEQ ID NO: 1553), SGSGASN (SEQ ID NO: 7 of US20160369298; herein SEQ ID NO: 1554), SASGASN (SEQ ID NO: 8, 175, and 221 of US20160369298; herein SEQ ID NO: 1555), SESGTSN (SEQ ID NO: 9 of US20160369298; herein SEQ ID NO: 1556), STTGGSN (SEQ ID NO: 10 of US20160369298; herein SEQ ID NO: 1557), SSAGSTN (SEQ ID NO: 11 of US20160369298; herein SEQ ID NO: 1558), NNDSQA (SEQ ID NO: 12 of US20160369298; herein SEQ ID NO: 1559), NNRNQA (SEQ ID NO: 13 of US20160369298; herein SEQ ID NO: 1560), NNNKQA (SEQ ID NO: 14 of US20160369298; herein SEQ ID NO: 1561), NAKRQA (SEQ ID NO: 15 of US20160369298; herein SEQ ID NO: 1562), NDEHQA (SEQ ID NO: 16 of US20160369298; herein SEQ ID NO: 1563), NTSQKA (SEQ ID NO: 17 of US20160369298; herein SEQ ID NO: 1564), YYLSRTNTPSGTDIQSRLVESQAGA (SEQ ID NO: 18 of US20160369298; herein SEQ ID NO: 1565), YYLSRTNTDSGTETQSGLDFSQAGA (SEQ ID NO: 19 of US20160369298; herein SEQ ID NO: 1566), YYLSRTNTESGTPTQSALEFSQAGA (SEQ ID NO: 20 of US20160369298; herein SEQ ID NO: 1567), YYLSRTNTHSGTHTQSPLHFSQAGA (SEQ ID NO: 21 of US20160369298; herein SEQ ID NO: 1568), YYLSRINTSSGTITISHLIFSQAGA (SEQ ID NO: 22 of US20160369298; herein SEQ ID NO: 1569), YYLSRTNTRSGIMTKSSLMFSQAGA (SEQ ID NO: 23 of US20160369298; herein SEQ ID NO: 1570), YYLSRTNTKSGRKTLSNLSFSQAGA (SEQ ID NO: 24 of US20160369298; herein SEQ ID NO: 1571), YYLSRINDGSGPVTPSKLRFSQRGA (SEQ ID NO: 25 of US20160369298; herein SEQ ID NO: 1572), YYLSRTNAASGHATHSDLKFQPGA (SEQ ID NO: 26 of US20160369298; herein SEQ ID NO: 1573), YYLSRTNGQAGSLTMSELGESQVGA (SEQ ID NO: 27 of US20160369298; herein SEQ ID NO: 1574), YYLSRTNSTGGNQTTSQLLFSQLSA (SEQ ID NO: 28 of US20160369298; herein SEQ ID NO: 1575), YFLSRTNNNTGLNTNSTLNFSQGRA (SEQ ID NO: 29 of US20160369298; herein SEQ ID NO: 1576), SKTGADNNNSEYSWTG (SEQ ID NO: 30 of US20160369298; herein SEQ ID NO: 1577), SKTDADNNNSEYSWTG (SEQ ID NO: 31 of US20160369298; herein SEQ ID NO: 1578), SKTEADN⁻NNSEYSWTG (SEQ ID NO: 32 of US20160369298; herein SEQ ID NO: 1579), SKTPADNNNSEYSWTG (SEQ ID NO: 33 of US20160369298; herein SEQ ID NO: 1580), SKTHADNNNSEYSWTG (SEQ ID NO: 34 of US20160369298; herein SEQ ID NO: 1581), SKTQADNNNSEYSWTG (SEQ ID NO: 35 of US20160369298; herein SEQ NO: 1582). SKTIADNNNSEYSWTG (SEQ 11113 NO: 36 of US20160369298; herein SEQ ID NO: 1583), SKTMADNNNSEYSWTG (SEQ ID NO: 37 of US20160369298; herein SEQ ID NO: 1584), SKTRADNNNSEYSWTG (SEQ ID NO: 38 of US20160369298; herein SEQ ID NO: 1585), SKTNADNNNSEYSWTG (SEQ ID NO: 39 of US20160369298; herein SEQ ID NO: 1586), SKTVGRNNNSEYSWTG (SEQ ID NO: 40 of US20160369298; herein SEQ ID NO: 1587), SKTADRNNNSEYSWTG (SEQ ID NO: 41 of US20160369298, herein SEQ ID NO: 1588), SKKLSQNNNSKYSWQG (SEQ ID NO: 42 of US20160369298; herein SEQ ID NO: 1589), SKPTTGNNNSDYSWPG (SEQ ID NO: 43 of US20160369298; herein SEQ ID NO: 1590), STQKNENNNSNYSWPG (SEQ ID NO: 44 of US20160369298; herein SEQ ID NO: 1591), HKDDEGKF (SEQ ID NO: 45 of US20160369298; herein SEQ ID NO: 1592), HKDDNRKF (SEQ ID NO: 46 of US20160369298; herein SEQ ID NO: 1593). FIKDDINKF (SEQ ID NO: 47 of US20160369298; herein SEQ ID NO: 1594), HEDSDKNF (SEQ ID NO: 48 of US20160369298; herein SEQ ID NO: 1595), HRDGADST (SEQ ID NO: 49 of US20160369298; herein SEQ ID NO: 1596), HGDNKSRF (SEQ ID NO: 50 of US20160369298; herein SEQ ID NO: 1597). KQGSEKTNVDFEEV (SEQ ID NO: 51 of US20160369298; herein SEQ ID NO: 1598), KQGSEKTNVDSEEV (SEQ ID NO: 52 of US20160369298; herein SEQ ID NO: 1599), KQGSEKTNVDVEEV (SEQ ID NO: 53 of US20160369298; herein SEQ ID NO: 1600), KQGSDKINVDDAGV (SEQ ID NO: 54 of US20160369298; herein SEQ ID NO: 1601), KQGSSKTNVDPREV (SEQ ID NO: 55 of US20160369298; herein SEQ ID NO: 1602), KQGSRKTNVDHKQV (SEQ ID NO: 56 of US20160369298; herein SEQ ID NO: 1603), KQGSKGGNVDTNRV (SEQ ID NO: 57 of US20160369298; herein SEQ ID NO: 1604), KQGSGEANVDNGDV (SEQ NO: 58 of US20160369298; herein SEQ ID NO: 1605), KQDAAADNIDYDHV (SEQ ID NO: 59 of US20160369298; herein SEQ ID NO: 1606), KQSGTRSNAAASSV (SEQ ID NO: 60 of US20160369298; herein SEQ ID NO: 1607), KENTNTNDTELTNV (SEQ ID NO: 61 of US20160369298; herein SEQ ID NO: 1608), QRGNNVAATADVNT (SEQ ID NO: 62 of US20160369298; herein SEQ ID NO: 1609), QRGNNEAATADVNT (SEQ ID NO: 63 of US20160369298; herein SEQ ID NO: 1610), QRGNNPAATADVNT (SEQ ID NO: 64 of US20160369298; herein SEQ ID NO: 1611), QRGNNHAATADVNT (SEQ ID NO: 65 of US20160369298; herein SEQ ID NO: 1612), QEENNIAATPGVNT (SEQ ID NO: 66 of US20160369298; herein SEQ ID NO: 1613), QPPNNIMAA IHEVNT (SEQ ID NO: 67 of US20160369298; herein SEQ ID NO: 1614), QHHNNSAATTIVNT (SEQ ID NO: 68 of US20160369298; herein SEQ ID NO: 1615), QTTNNRAAFNMVET (SEQ IL) NO: 69 of US20160369298; herein SEQ ID NO: 1616), QKKNNNAASKKVAT (SEQ ID NO: 70 of US20160369298; herein SEQ ID NO: 1617), QGGNNKAADDAVKT (SEQ ID NO: 71 of US20160369298; herein SEQ ID NO: 1618), QAAKGGAADDAVKT (SEQ ID NO: 72 of US20160369298; herein SEQ ID NO: 1619), QDDRAAAANESVDT (SEQ ID NO: 73 of US20160369298; herein SEQ ID NO: 1620), QQQHDDAAYQRVHT (SEQ ID NO: 74 of US20160369298; herein SEQ ID NO: 1621), QSSSSLAAVSTVQT (SEQ ID NO: 75 of US20160369298; herein SEQ ID NO: 1622), QNNQTTAAIRNVTT (SEQ ID NO: 76 of US20160369298; herein SEQ ID NO: 1623), NYNKKSDNVDFT (SEQ ID NO: 77 of US20160369298; herein SEQ ID NO: 1624), NYNKKSENVDFT (SEQ ID NO: 78 of US20160369298; herein SEQ ID NO: 1625), NYNKKSLNVDFT (SEQ ID NO: 79 of US20160369298; herein SEQ ID NO: 1626), NYNKKSPNVDFT (SEQ ID NO: 80 of US20160369298; herein SEQ ID NO: 1627), NYSKKSHCVDFT (SEQ ID NO: 81 of US20160369298; herein SEQ ID NO: 1628), NYRKFIYVDFT (SEQ ID NO: 82 of US20160369298; herein SEQ ID NO: 1629), NYKEKKDVHFT (SEQ ID NO: 83 of US20160369298; herein SEQ ID NO: 1630), NYGHRAIVQFT (SEQ ID NO: 84 of US20160369298; herein SEQ ID NO: 163 NYANHQFVVCT (SEQ ID NO: 85 of US20160369298; herein SEQ ID NO: 1632), NYDDDPTGVLLT (SEQ ID NO: 86 of US20160369298; herein SEQ ID NO: 1633), NYDDRIGVIAT (SEQ IL) NO: 87 of US20160369298; herein SEQ ID NO: 1634), NFEQQNSVEWT (SEQ ID NO: 88 of US20160369298; herein SEQ ID NO: 1635), SQSGASN (SEQ ID NO: 89 and SEQ ID NO: 241 of US20160369298; herein SEQ ID NO: 1636), NNGSQA (SEQ ID NO: 90 of US20160369298; herein SEQ ID NO: 1637), YYLSRTNTPSGTTTWSRLQFSQAGA (SEQ ID NO: 91 of 0520160369298; herein SEQ ID NO: 1638), SKTSADNNNSEYSWTG (SEQ ID NO: 92 of 0520160369298; herein SEQ ID NO: 1639), IIKDDEEKE (SEQ ID NO: 93, 209, 214, 219, 224, 234, 239, and 244 of US20160369298; herein SEQ ID NO: 1640), KQGSEKTNVDIEEV (SEQ ID NO: 94 of US20160369298; herein SEQ ID NO: 1641), QRGNNQAATADVNT (SEQ ID NO: 95 of US20160369298; herein SEQ ID NO: 1642), NYNKKSVNVDFT (SEQ ID NO: 96 of US20160369298; herein SEQ ID NO: 1643), SQSGASNYNTPSGTTTQSRLQFSTSADNNNSEYSWTGATKYH (SEQ ID NO: 106 of US20160369298; herein SEQ ID NO: 1644), SASGASNFNSEGGSLTQSSLGFSTDGENNNSDFSWTGATKYFI (SEQ ID NO: 107 of US20160369298; herein SEQ ID NO: 1645), SQSGASNYNTPSGTTTQSRILQFSTDGENNNSDFSWTGATKYH (SEQ ID NO: 108 of US20160369298; herein SEQ ID NO: 1646), SASGASNYNIPSGITIQSRLQESTSADNNNSEFSWPGATIYH (SEQ ID NO: 109 of US20160369298; herein SEQ ID NO: 1647), SQSGASNFNSEGGSLTQSSLGESIDGENNNSDFSWTGATKYFI (SEQ ID NO: 110 of US20160369298; herein SEQ ID NO: 1648), SASGASNYNTPSGSLTQSSLGFSTDGENNNSDFSWTGATKYH (SEQ ID NO: 111 of US20160369298; herein SEQ ID NO: 1649), SQSGASNYNTPSG11TQSRLQFSTSADNNNSDESWTGATKYFI (SEQ ID NO: 112 of US20160369298; herein SEQ ID NO: 1650), SGAGASNFNSEGGSLTQSSLGFSTDGENNNSDFSWTGATKYH (SEQ ID NO: 113 of US20160369298; herein SEQ ID NO: 1651), SGAGASN (SEQ ID NO: 176 of US20160369298; herein SEQ ID NO: 1652), NSEGGSLTQSSLGFS (SEQ ID NO: 177, 185, 193 and 202 of US20160369298; herein SEQ ID NO: 1653), TDGENNNSDFS (SEQ ID NO: 178 of US20160369298; herein SEQ ID NO: 1654), SEESWPGATT (SEQ ID NO: 179 of US20160369298; herein SEQ ID NO: 1655), TSADNNNSDFSWT (SEQ ID NO: 180 of US20160369298; herein SEQ ID NO: 1656), SQSGASNY (SEQ ID NO: 181, 187, and 198 of US20160369298; herein SEQ ID NO: 1657), NTPSGTTTQSRLQFS (SEQ ID NO: 182, 188, 191, and 199 of US20160369298; herein SEQ ID NO: 1658), TSADNNNSEYSWTGATKYII (SEQ ID NO: 183 of US20160369298; herein SEQ ID NO: 1659), SASGASNF (SEQ ID NO: 184 of US20160369298; herein SEQ ID NO: 1660), TDGENNNSDFSWTGATKYH (SEQ ID NO: 186, 189, 194, 197, and 203 of US20160369298; herein SEQ ID NO: 1661), SASGASNY (SEQ ID NO: 190 and SEQ NO: 195 of US20160369298; herein SEQ ID NO: 1662), ISADNNNSEFSWPGATTYH (SEQ ID NO: 192 of US20160369298; herein SEQ ID NO: 1663), N IPSGSLTQSSLGFS (SEQ ID NO: 196 of US20160369298; herein SEQ ID NO: 1664), TSADNNNSDFSWTGAIKYI-I (SEQ ID NO: 200 of US20160369298; herein SEQ ID NO: 1665), SGAGASNF (SEQ ID NO: 201 of US20160369298; herein SEQ ID NO: 1666), CTCCAGVNISVVSMRSRMINSGCAGCIDHONSRNSGTCVMSACACAA (SEQ ID NO: 204 of US20160369298; herein SEQ ID NO: 1667), CTCCAGAGAGGCAACAGACAAGCAGCTACCGCAGATGTCAACACACAA (SEQ ID NO: 205 of U520160369298; herein SEQ ID NO: 1668), SAAGASN (SEQ ID NO: 206 of US20160369298; herein SEQ ID NO: 1669), YFLSRTNTESGSTTQSTLRFSQAG (SEQ ID NO: 207 of US20160369298; herein SEQ ID NO: 1670), SKTSADNNNSDPS (SEQ NO: 208, 228, and 253 of US20160369298; herein SEQ ID NO: 1671), KQGSEKTDVDIDKV (SEQ ID NO: 210 of US20160369298; herein SEQ ID NO: 1672), STAGASN (SEQ ID NO: 211 of US20160369298; herein SEQ ID NO: 1673), YFISRINTISGIETQSTURFSQAG (SEQ ID NO: 212 and SEQ ID NO: 247 of US20160369298; herein SEQ ID NO: 1674), SKTDGENNNSDFS (SEQ ID NO: 213 and SEQ ID NO: 248 of US20160369298; herein SEQ ID NO: 1675), KQGAAADDVEIDGV (SEQ ID NO: 215 and SEQ ID NO: 250 of US20160369298; herein SEQ ID NO: 1676), SEAGASN (SEQ ID NO: 216 of US20160369298; herein SEQ ID NO: 1677), YYLSRTNIPSGTHQSRLQFSQAG (SEQ ID NO: 217, 232 and 242 of US20160369298; herein SEQ ID NO: 1678), SKTSADNNNSEYS (SEQ ID NO: 218, 233, 238, and 243 of US20160369298; herein SEQ ID NO: 1679), KQGSEKTNVDIEKV (SEQ ID NO: 220, 225 and 245 of US20160369298; herein SEQ ID NO: 1680), YFLSRTNDASGSDTKS ILLESQAG (SEQ ID NO: 222 of US20160369298; herein SEQ ID NO: 1681), STTPSENNNSEYS (SEQ ID NO: 223 of US20160369298, herein SEQ ID NO: 1682). SAAGATN (SEQ ID NO: 226 and. SEQ ID NO: 251 of US20160369298; herein SEQ ID NO: 1683), YFLSRINGEAGSAILSELRFSQAG (SEQ ID NO: 227 of US20160369298; herein SEQ ID NO: 1684), HGDDADRF (SEQ ID NO: 229 and SEQ ID NO: 254 of US20160369298; herein SEQ ID NO: 1685), KQGAEKSDVEVDRV (SEQ ID NO: 230 and SEQ ID NO: 255 of US20160369298; herein SEQ ID NO: 1686), KQDSGGDNIDIDQV (SEQ ID NO: 235 of US20160369298; herein SEQ ID NO: 1687), SDAGASN (SEQ ID NO: 236 of US20160369298; herein SEQ ID NO: 1688), YFLSRTNTEGGHDTQSTLIUSQAG (SEQ ID NO: 237 of US20160369298; herein SEQ ID NO: 1689), KEDGGGSDVAIDEV (SEQ ID NO: 240 of US20160369298; herein SEQ ID NO: 1690), SNAGASN (SEQ ID NO: 246 of US20160369298; herein SEQ ID NO: 1691), and NTLSRINGEAGSATLSELRFSQPG (SEQ ID NO: 252 of US20160369298; herein SEQ ID NO: 1692). Non-limiting examples of nucleotide sequences that may encode the amino acid mutated sites comprise the following, AGCVVMDCAGGARSCASCAAC (SEQ ID NO: 97 of US20160369298; herein SEQ ID NO: 1693), AACRACRRSMRSMAGGCA (SEQ ID NO: 98 of US20160369298; herein SEQ ID NO: 1694), CACRRGGACRRCRMSRRSARSTTT (SEQ ID NO: 99 of US20160369298; herein SEQ ID NO: 1695), TATTTCTTGAGCAGAACAAACRVCVVSRSCGGAMNCVHSACGMHSTCAVVSCTTV DSTITICTCAGSBCRGSGCG (SEQ ID NO: 100 of US20160369298; herein SEQ ID NO: 1696), TCAAMAMMAVNSRVCSRSAACAACAACAGTRASTTCTCGTGGMMAGGA (SEQ ID NO: 101 of US20160369298; herein SEQ ID NO: 1697), AAGSAARRCRSCRYSRVARVCRATRYCGMSNHCIWIVIVRSGTC (SEQ ID NO: 102 of US20160369298; herein SEQ ID NO: 1698), CAGVVSVVSMRSRVCVNSGCAGCTDHCVVSRNSGTCVMSACA (SEQ ID NO: 103 of US20160369298; herein SEQ ID NO: 1699), AACTWCRVSVASMATSVHSDDTGTGSWSTKSACT (SEQ ID NO: 104 of US20160369298; herein SEQ ID NO: 1700), TTG ITGAACATCACCACGTGACGCACGTTC (SEQ ID NO: 256 of US20160369298; herein SEQ ID NO: 1701), TCCCCGTGGITCTACTACATAATGTGGCCG (SEQ ID NO: 257 of US20160369298; herein SEQ ID NO: 1702), TTCCACACTCCGTTTTGGATAATGTTGAAC (SEQ ID NO: 258 of US20160369298; herein SEQ ID NO: 1703), AGGGACATCCCCAGCTCCATGCTGTGGTCG (SEQ ID NO: 259 of US20160369298; herein SEQ ID NO: 1704), AGGGACAACCCCTCCGACTCGCCCTAATCC (SEQ ID NO: 260 of US20160369298; herein SEQ ID NO: 1705). TCCTAGTAGAAGACACCCTCTCACTGCCCG (SEQ ID NO: 261 of US20160369298; herein SEQ m NO: 1706), AGTACCATGTACACCCACTCTCCCAGTGCC (SEQ ID NO: 262 of US20160369298; herein SEQ ID NO: 1707), ATATGGACGTTCATGCTGATCACCATACCG (SEQ ID NO: 263 of US20160369298; herein SEQ ID NO: 1708), AGCAGGAGCTCCTTGGCCTCAGCGTGCGAG (SEQ ID NO: 264 of US20160369298; herein SEQ ID NO: 1709). ACAAGCAGCTTCACTATGACAACCACTGAC (SEQ ID NO: 265 of US20160369298; herein SEQ ID NO: 1710), CAGCCTAGGAACTGGCTTCCTGGACCCTGGACCGCCAGCAGAGAGTCTCAAMA MMAVNSRVCSRSAACAACAACAGTRASTTCTCCTGGMMAGGAGCTACCAAGTAC CACCTCAATGGCAGAGACTCTCTGGTGAATCCCGGACCAGCTATGGCAAGCCAC RRGGACRRCRMSRRSARSTTTTTTCCTCAGAGCGGGGTTCTCATCTTTGGGAAGSA ARRCRSCRVSRVARVCRATRYCGMSNFICRVMVRSGTCATGATTACAGACGAAGA GGAGATCTGGAC (SEQ ID NO: 266 of US20160369298; herein SEQ ID NO: 1711). TGGGACAATGGCGGTCGIVICTCAGAGTTKTKKI (SEQ ID NO: :267 of US20160369298; herein SEQ ID NO: 1712), AGAGGACCKKTCCTCGATGGTTCATGGTGGAGTTA (SEQ ID NO: 268 of US20160369298; herein SEQ ID NO: 1713), CCACTTAGGGCCTGGTCGATACCGTTCGGTG (SEQ ID NO: 269 of US20160369298; herein SEQ ID NO: 1714). or TCTCGCCCCAAGAGTAGAAACCCTTCSTTYYG (SEQ ID NO: 270 of US20160369298; herein SEQ ID NO: 1715).

[0160] In certain embodiments, the AAV serotype may comprise an ocular cell targeting peptide as described in International Patent Publication WO2016134375 (the content of which is incorporated herein by reference in its entirety as related to AAV capsids, insofar as it does not conflict with the present disclosure), such as, but not limited to SEQ ID NO: 9. or SEQ ID NO:10 of WO2016134375. Further, any of the ocular cell targeting peptides or amino acids described in WO2016134375, may be inserted into any parent AAV serotype, such as, but not limited to, AAV2 (SEQ ID NO:8 of WO2016134375; herein SEQ ID ⁻NO: 1716), or AAV9 (SEQ ID NO: 11 of WO2016134375; herein SEQ ID NO: 1717). In certain embodiments, modifications, such as insertions are made in AAV2 proteins at P34-A35, T138-A139, A139-P140, 0453-T454, N587-R588, and/or R588-Q589. In certain embodiments, insertions are made at D384, G385, 1560, T561, N562, E563, E564, E565, N704, and/or Y705 of AAV9. The ocular cell targeting peptide may be, but is not limited to, any of the following amino acid sequences, GSTPPPM (SEQ ID NO: 1 of WO2016134375; herein SEQ m NO: 1718), or GETRAPL (SEQ ID NO: 4 of WO2016134375; herein SEQ ID NO: 1719).

[0161] In certain embodiments, the AAV serotype may be modified as described in U.S. Patent Application Publication No, US 20170145405 (the content of which is incorporated herein by reference in its entirety as related to AAV capsids, insofar as it does not conflict with the present disclosure). AAV serotypes may comprise, modified AAV2 (e.g., modifications at Y444F, Y500F, Y730F and/or S662V), modified AAV3 (e.g., modifications at Y705F, Y731F and/or T492V), and modified AAV6 (e.g., modifications at S663V and/or T492V).

[0162] In certain embodiments, the AAV serotype may be modified as described in the International Publication No. WO2017083722 (the content of which is incorporated herein by reference in its entirety as related to AAV capsids, insofar as it does not conflict with the present disclosure). AAV serotypes may comprise, AAV1 (Y705+731F+T492V), AAV2 (Y444+500+730F+T491V), AAV3 (Y705+73 IF), AAV5, AAV 5(Y436+693+719F), AAV6 (VP3 variant Y705F/Y731.17T492V) AAV8 (Y733F), AAV9, AAV9 (VP3 variant Y731F), and AAV10 (Y733F).

[0163] In certain embodiments, the AAV serotype may comprise, as described in International Patent Publication No. WO2017015102 (the content of which is incorporated herein by reference in its entirety as related to AAV capsids, insofar as it does not conflict with the present disclosure), an engineered epitope comprising the amino acids SPAKFA (SEQ ID NO: 24 of WO2017015102; herein SEQ ID NO: 1720) or NKDKILN (SEQ NO:2 of WO2017015102; herein SEQ ID NO: 1721). The epitope may be inserted in the region of amino acids 665 to 670 based on the numbering of the VP1 capsid of AAV8 (SEQ ID NO: 3 of WO2017015102) and/or residues 664 to 668 of AAV3B (SEQ ID NO: 3).

[0164] In certain embodiments, the AAV serotype may be, or may have a sequence as described in International Patent Publication No. WO 017058892 (the content of which is incorporated herein by reference in its entirety as related to AAV capsids, insofar as it does not conflict with the present disclosure), such as, but not limited to, AAV variants with capsid proteins that may comprise a substitution at one or more (e.g., 2, 3, 4, 5, 6, or 7) of amino acid residues 262-268, 370-379, 451-459, 472-473, 493-500, 528-534, 547-552, 588-597, 709-710, or 716-722 of AAV1, in any combination, or the equivalent amino acid residues in AAV2, AAV3, AAV4, AAV5, AAV6, AAV7, AAV8, AAV9, AAV 10, AAV11, AAV12, AAVrh8, AAVrh10, AAVrh32.33, bovine AAV, or avian AAV. The amino acid substitution(s) may be, but is/are not. limited to, any of the amino acid sequences described in WO2017058892. In certain embodiments, the AAV may rise an amino acid substitution at residues 256L, 258K, 259Q, 261S, 263A, 264S, 265T, 266G, 272H, 385S, 386Q, S472R, V473D, N500E 547S, 709A, 710N, 716D, 717N, 718N, 720I- A456T, Q457T, N458Q, K459S, T492S, K493A, S586R, S587G, S588N, T589R and/or 722T of AAV1 (SEQ ID NO: 1 of WO2017058892) in any combination, 244N, 246Q, 248R, 249E, 250I, 251K, 252S, 253G, 254S, 255V, 256D, 263Y, 377E, 378N, 453L, 456R, 532Q, 533P, 535N, 536P, 537G, 538T, 539T, 540A, 541T, 542Y, 543L, 546N, 653V, 654P, 656S, 697Q, 698F, 704D, 705S, 706T, 707G, 708E, 709Y and/or 710R of AAV5 (SEQ ID NO:5 of WO2017058892) in any combination, 248R, 316V, 317Q, 318D, 319S, 443N, 530N, 531S, 532Q, 533P, 534A, 535N, 540A, 541 T, 542Y, 543L, 545G, 546N, 697Q, 704D, 706T, 708E, 709Y and/or 710R of AAVS (SEQ ID NO: 5 of WO2017058892) in any combination, 264S, 266G, 269N, 272H, 457Q, 588S and/or 589I of AAV6 (SEQ ID NO:6 WO2017058892) in any combination, 457I, 459N, 496G, 499N, 500N, 589Q, 590N and/or 592A of AAV8 (SEQ ID NO: 8 WO2017058892) in any combination,451I, 452N, 453G, 454S, 455G, 456Q, 457N and/or 458Q of AAV9 (SEQ ID NO: 9 WO2017058892) in any combination.

[0165] In certain embodiments, the AAV may comprise a sequence of amino acids at positions 155, 156, and 157 of VP1 or at positions 17, 18, 19, and 20 of VP2, as described in International Publication No. WO 2017066764 (the content of which is incorporated herein by reference in its entirety as related to AAV capsids, insofar as it does not conflict with the present disclosure). The sequences of amino acid may be, but are not limited to, N-S-S, S-X-S, S-S-Y, N-X-S, N-S-Y, S-X-Y, or N-X-Y, where N, X, and Y are, but not limited to, independently, non-serine or non-threonine amino acids, wherein the AAV may be, but is not limited to, AAV1, AAV2, AAV3, AAV4, AAV5, AAV6, AAV7, AAV8, AAV9, AAV10, AAV11, or AAV12. In certain embodiments, the AAV may comprise a deletion of at least one amino acid at position(s) 156, 157, or 158 of VP1 or at positions 19, 20, or 21 of VP2, wherein the AAV may be, but is not limited to AAVI, AAV2, AAV3, AAV4, AAVS, AAV6, AAV7, AAV8, AAV9, AAV10, AAV 11, or AAV12.

[0166] In certain embodiments, the AAV may be a serotype generated by Crc-recombination-based AAV targeted evolution (CREATE) as described by Deverman et al., (Nature Biotechnology 34(2):204-209 (2016)), Chan et al., (Nature Neuroscience 20(8):1172-1179 (2017)), and in International Patent Application Publication Nos. WO2015038958 and WO2017100671 (the content of which is incorporated herein by reference in its entirety as related to AAV capsids, insofar as it does nor. conflict with the present disclosure). In certain embodiments, AAV serotypes generated in this mariner have improved CNS transduction and/or neuronal and astrocytic tropism, as compared to AAV serotypes not generated in this manner. As non-limiting examples, the AAV serotype may comprise a targeting peptide such as, but not limited to, PHP.B, PHP.B2, PHP.B3, PHP.A, PHP.S, PHP.N, G2A12, G2A15, G2A3, G2B4, or G2B5. In certain embodiments, these AAV serotypes may be derivates of AAV9 (SEQ ID NO: 136) or AAV9 K449R (SEQ 11) NO: 9) with an amino acid insert between amino acids 588 and 589. Non-limiting examples of these amino acid inserts comprise TLAVPFK SEQ ID NO: 1260), SVSKPFL (PHP.B2, SEQ ID NO: 1268), FTLTTPK (PHP.B3; SEQ ID NO: 1269), YTLSQGW (PHP.A; SEQ ID NO: 1275), QAVRTSL (PHP.S; SEQ ID NO: 1319), LAKERLS (G2A3; SEQ ID NO: 1320), MNSTKNV (G2B4; SEQ ID NO: 1321), VSGGHHS (G2B5; SEQ ID NO: 1322), and/or DGTLAVPFKAQ (PHP.N; SEQ ID NO: 1289).

[0167] In certain embodiments, the AAV serotype may be as described in Jackson et al (Frontiers in Molecular Neuroscience 9:154 (2016)) (the content of which is incorporated herein by reference in its entirety as related to AAV capsids, insofar as it does not conflict with the present disclosure).

[0168] In certain embodiments, the AAV serotype is AAV9 (SEQ ID NO: 135 or 136). In certain embodiments, the AAV serotype is an AAV9 with a peptide insert.

[0169] In certain embodiments, the AAV serotype is a K449R AAV9 variant (SEQ ID NO: 9). AAV9 K449R has the same function as wild-type A.A.V9. In certain embodiments, the AAV serotype is an AAV9 K449R, with a peptide insert.

[0170] In certain embodiments, the AAV serotype is PHP.B (e.g., as described in WO2015038958). In certain embodiments, the AAV serotype is paired with a synapsin promoter to enhance neuronal transduction, as compared to when more ubiquitous promoters are used (i.e., CBA or CMV).

[0171] In certain embodiments, the AAV serotype is PHP.N (e.g., as described in WO2017100671).

[0172] In certain embodiments, the AAV serotype is a serotype comprising the AAVPHP.N (PHP.N) peptide or a variant thereof.

[0173] In certain embodiments, the AAV serotype is a serotype comprising the AAVPHP.B (PHP.B) peptide or a variant thereof.

[0174] In certain embodiments, the AAV serotype is a serotype comprising the AAVPHP.A (PHRA) peptide or a variant thereof

[0175] In certain embodiments, the AAV serotype is a serotype comprising the PHP.S peptide or a variant thereof.

[0176] In certain embodiments, the AAV serotype is a serotype comprising the PHP.B2 peptide or a variant thereof.

[0177] In certain embodiments, the AAV serotype is a serotype comprising the PHP.B3 peptide or a variant thereof.

[0178] In certain embodiments, the AAV serotype is a serotype comprising the G2B4 peptide or a variant thereof.

[0179] In certain embodiments, the AAV serotype is a serotype comprising the G2B5 peptide or a variant thereof.

[0180] In certain embodiments, the AAV serotype is VOY101 or a variant thereof In certain embodiments, the VOY101 comprises the amino acid sequence of SEQ ID NO: 1. In certain embodiments, the capsid sequence comprises the nucleic acid sequence of SEQ ID NO:1722.

[0181] In certain embodiments, the AAV serotype is VOY201 or a variant thereof In certain embodiments, the VOY201 comprises the amino acid sequence of SEQ NO: 1724. In certain embodiments, the capsid sequence comprises the nucleic acid sequence of SEQ ID NO: 1723.

[0182] In certain embodiments, the AAV capsid allows for blood brain harrier penetration following intravenous administration. Non-limiting examples of such AAV capsids comprise AAV9, AAV9 K449R, VOY101, VOY201, or AAV capsids comprising a peptide insert such as, but not limited to, AAVPHP.N (PHRN), AAVPHP.B (PHP.B), PHP.S, G2A3, G2B4, G2B5, G2A12, G2A15, PHP.B2, PHP.B3, or AAVPHP.A (PHP.A),

[0183] In certain embodiments, the AAV serotype may comprise a capsid amino acid sequence with 50%, 51%, 52%, 53%, 54%, 55%, 56%, 57%, 58%, 59%, 60%, 61%, 62%, 63%, 64%, 65%, 66%, 67%, 68%, 69%, 70%, 71%, 72%, 73%, 74%, 75%, 76%, 77%, 78%, 79%, 80%, 81%, 82%, 83%, 84%, 85%, 86%, 87%, 88%, 89%, 90%, 91%, 92%, 93%, 94%, 95%, 96%, 97%, 98%, 99%, or 100% identity to any of the those described above. In certain embodiments, the AAV serotype comprises a capsid amino acid sequence at least 80% identical to SEQ ID NO: 1, 2, 3, 9, 136, or 1724. In certain embodiments, the AAV serotype comprises a capsid amino acid sequence at least 85% identical to SEQ ID NO: 1, 2, 3, 9, 136, or 1724. In certain embodiments, the AAV serotype comprises a capsid amino acid sequence at least 90% identical to SEQ ID NO: 1, 2, 3, 9, 136, or 1724. In certain embodiments, the AAV serotype comprises a capsid amino acid sequence at least 95% identical to SEQ ID NO: 1, 2, 3, 9, 136, or 1724. In certain embodiments, the AAV serotype comprises a capsid amino acid sequence at least 99% identical to SEQ ID NO: 1, 2, 3, 9, 136, or 1724. In certain embodiments, the AAV serotype comprises a capsid amino acid of SEQ ID NO: 1, 2, 3, 9, 136, or 1724.

[0184] In certain embodiments, the AAV serotype may be encoded by a capsid nucleic acid sequence with 50%, 51%, 52%, 53%, 54%, 55%, 56%, 57%, 58%, 59%, 60%, 61%, 62%, 63%, 64%, 65%, 66%, 67%, 68%, 69%, 70%, 71%, 72%, 73%, 74%, 75%, 76%, 77%. 78%, 79%. 80%, 81%, 82%. 83%, 84%, 85%. 86%, 87%, 88%. 89%, 90%, 91%. 92%, 93%, 94%, 95%, 96%, 97%, 98%, 99%, or 100% identity to any of the those described above. In certain embodiments, the AAV serotype comprises a capsid nucleic acid sequence at least 80% identical to SEQ ID NO: 4, 135, 1722. or 1723. In certain embodiments, the AAV serotype comprises a capsid nucleic acid sequence at least 85% identical to SEQ ID NO: 4, 135, 1722, or 1723. In certain embodiments, the AAV serotype comprises a capsid nucleic acid sequence at least 90% identical to SEQ ID NO: 4, 135, 1722, or 1723. In certain embodiments, the AAV serotype comprises a capsid nucleic acid sequence at least 95% identical to SEQ ID NO: 4, 135, 1722, or 1723. In certain embodiments, the AAV serotype comprises a capsid nucleic acid sequence at least 99% identical to SEQ ID NO: 4, 135, 1722, or 1723. In certain embodiments, the AAV serotype comprises a capsid nucleic acid sequence of SEQ ID NO: 4, 135. 1722, or 1723.

[0185] In certain embodiments, the initiation codon for translation of the AAV VP1 capsid protein may be CTG, TTG, or GTG as described in U.S. Pat. No. 8,163,543 (the content of which is incorporated herein by reference in its entirety as related to AAV capsids and start codons, insofar as it does not conflict with the present disclosure).

[0186] The present disclosure refers to structural capsid proteins (comprising VP1, VP2, and. VP3), which are encoded by capsid (Cap) genes. These capsid proteins form an outer protein structural shell (i.e. capsid) of a viral vector such as AAV. VP capsid proteins synthesized from Cap polynucleotides generally comprise a methionine as the first amino acid in the peptide sequence (Met1), which is associated with the start codon (AUG or ATG) in the corresponding Cap nucleotide sequence. However, it is common for a first-methionine (Met1) residue or generally any first amino acid (AA1) to be cleaved off after or during polypeptide synthesis by protein processing enzymes such as Met-aminopeptidases. This “Met/AA-clipping” process often correlates with a corresponding acetylation of the second amino acid in the polypeptide sequence (e.g., alanine, valine, serine, threonine, etc.). Met-clipping commonly occurs with VP1 and VP3 capsid proteins but can also occur with VP2 capsid proteins.

[0187] Where the Met/AA-clipping is incomplete, a mixture of one or more (one, two, or three) VP capsid proteins comprising the viral capsid may be produced, some of which may comprise a Met1/AA1 amino acid (Met+/AA+) and some of which may lack a Met1/AA1 amino acid as a result of Met/AA-clipping (Met−/AA−). For further discussion regarding Met/AA-clipping in capsid proteins, see Jin, et al. Direct Liquid Chromatography/Mass Spectrometry Analysis for Complete Characterization of Recombinant Adeno-Associated Virus Capsid Proteins. Hum Gene Ther Methods. 2017 Oct. 28(5):255-267; Hwang, et al. N-Terminal Acetylation of Cellular Proteins Creates Specific Degradation Signals. Science. 2010 Feb. 19. 327(5968): 973-977; the contents of which are incorporated herein by reference in their entireties as related to Met/AA-clipping in capsid proteins, insofar as they do not conflict with the present disclosure.

[0188] According to the present disclosure, references to capsid proteins are not limited to either clipped (Met−/AA−) or unclipped (Met+/AA+) sequences and may, in context, refer to independent capsid proteins, viral capsids comprised of a mixture of capsid proteins, and/or polynucleotide sequences (or fragments thereof) which encode, describe, produce, or result in capsid proteins of the present disclosure. A direct reference to a “capsid protein” or “capsid polypeptide” (such as VP1, VP2, or VP3) may also comprise VP capsid proteins which comprise a Met1/AA1 amino acid (Met+/AA+) as well as corresponding VP capsid proteins which lack the Met1/AA1amino acid as a result of Met/AA-clipping (Met−/AA−).

[0189] Further, according to the present disclosure, a reference to a specific SEQ ID NO (whether a protein or nucleic acid) that comprises or encodes, respectively, one or more capsid proteins that comprise a Met1/AA1amino acid (Met+/AA+) should be understood to teach the VP capsid proteins that lack the Met1/AA1 amino acid as upon review of the sequence, it is readily apparent any sequence that merely lacks the first listed amino acid (whether or not methionine).

[0190] As a non-limiting example, reference to a VP1 polypeptide sequence which is 736 amino acids in length and which comprises a “Met1” amino acid (Met+) encoded by the AUG/ATG start codon may also be understood to teach a VP1 polypeptide sequence that is 735 amino acids in length and that does not comprise the “Met1” amino acid (Met−) of the 736 amino acid Met+ sequence. As a second non-limiting example, reference to a VP1 polypeptide sequence that is 736 amino acids in length and that comprises an “AA1” amino acid (AA1+) encoded by any NNN initiator codon may also be understood to teach a VP1 polypeptide sequence that is 735 amino acids in length and that does not comprise the “AA1” amino acid (AA1−) of the 736 amino acid AA1+ sequence.

[0191] References to viral capsids foamed. from VP capsid proteins (such as reference to specific AAV capsid serotypes) can incorporate VP capsid proteins that comprise a Met1/AA1 amino acid (Met+/AA1+), corresponding VP capsid proteins that lack the Met1/AA1 amino acid as a result of Met/AA1-clipping (Met−/AA1−), or combinations thereof (Met+/AA1+ and Met−/AA1−).

[0192] As a non-limiting example, an AAV capsid serotype can comprise VP1 (Met+/AA1+), VP1 (Met−/AA1−), or a combination of VP1 (Met+/AA1+) and VP1 (Met-/AA1−). An AAV capsid serotype can also comprise VP3 (Met+/AA1+), VP3 (Met−/AA1−), or a combination of VP3 (Met+/AA1+) and VP3 (Met−/AA1−); and can also comprise similar optional combinations of VP2 (Met+/AA1) and VP2 (Met−/AA1−).

### Payloads

[0193] AAV particles of the present disclosure can comprise, or be produced using, at least one payload construct which comprises at least one payload region. In certain embodiments, the payload region may be located within a viral genome, such as the viral genome of a payload construct, At the 5′ and/or the 3′ end of the payload region there may be at least one inverted terminal repeat (ITR). Within the payload region, there may be a promoter region, an intron region and a coding region.

[0194] In certain embodiments, a payload construct of the present disclosure can be a bacmid, also known as a baculovims plasmid or recombinant baculovinis genome.

[0195] In certain embodiments, the payload region of the AAV particle comprises one or more nucleic acid sequences encoding a polypeptide or protein of interest.

[0196] In certain embodiments, the AAV particle comprises a viral genome with a payload region comprising nucleic acid sequences encoding more than one polypeptide of interest. In certain embodiments, a viral genome encoding one or more polypeptides may be replicated and packaged into a viral particle. A target cell transduced with a viral particle comprising the vector genome may express each of the one or more polypeptides in the single target cell.

[0197] Where the AAV particle payload region encodes a polypeptide, the polypeptide may be a peptide, polypeptide or protein. As a non-limiting example, the payload region may encode at least one therapeutic protein of interest. The AAV viral genomes encoding polypeptides described herein may be useful in the fields of human disease, viruses, infections veterinary applications and a variety of in vivo and in vitro settings.

[0198] In certain embodiments, administration of the formulated AAV particles (which comprise the viral genome) to a subject will increase the expression of a protein in a subject, In certain embodiments, the increase of the expression of the protein will reduce the effects and/or symptoms of a disease or ailment associated with the polypeptide encoded by the payload.

[0199] In certain embodiments, the AAV particle comprises a viral genome with a payload region comprising a nucleic acid sequence encoding a protein of interest (i.e. a payload protein, therapeutic protein)

[0200] In certain embodiments, the payload region comprises a nucleic acid sequence encoding a protein comprising but not limited to an antibody, Aromatic L-Amino Acid Decarboxylase (AADC). ApoE2, Frataxin, survival motor neuron (SAM) protein, glucocerebrosidase, N-sulfogiucosamine sulfohydrolase, N-acetyl-alpha-glucosaminidase, iduronate 2-sulfatase, alpha-L-iduronidase, palmitoyl-protein thioesterase 1, tripeptidyl peptidase 1, battenin, CLNS, CLN6 (linclin), NIFSD8, CLN8, aspartoacylase (ASPA), progranulin (GRN). MeCP2, beta-galactosidase (GLB1) and/or gigaxonin (GAN).

[0201] In certain embodiments, the AAV particle comprises a viral genome with a payload region comprising a nucleic acid sequence encoding any of the disease-associated proteins (and fragment or variants thereof) described in any one of the following international Publications: WO2016073693, WO2017023724, WO2016077687, WO2016077689, WO2018204786, WO2017201258, WO2017201248, WO2018204803, WO2018204797, WO2017189959, WO2017189963, WO2017189964, WO2015191508, WO2016094783, WO20160137949, WO2017075335; the contents of which are each incorporated herein by reference in their entireties insofar as they do not conflict with the present disclosure.

[0202] Amino acid sequences encoded by payload regions of the viral genomes of the disclosure may be translated as a whole polypeptide, a plurality of polypeptides or fragments of polypeptides, which independently may be encoded by one or more nucleic acids, fragments of nucleic acids or variants of any of the aforementioned, As used herein, “polypeptide” means a polymer of amino acid residues (natural or unnatural) linked together most often by peptide bonds. The term, as used herein, refers to proteins, polypeptides, and peptides of any size, structure, or function. In some instances, the polypeptide encoded is smaller than about 50 amino acids and the polypeptide is then termed a peptide. If the polypeptide is a peptide, it will be at least about 2, 3, 4, or at least 5 amino acid residues long. Thus, polypeptides comprise gene products, naturally occurring polypeptides, synthetic polypeptides, homologs, orthologs, paralogs, fragments and other equivalents, variants, and analogs of the foregoing. A polypeptide may be a single molecule or may be a multi-molecular complex such as a dimer, trimer or tetramer. They may also comprise single chain or multichain polypeptides and may be associated or linked. The term polypeptide may also apply to amino acid polymers in which one or more amino acid residues are an artificial chemical analogue of a corresponding naturally occurring amino acid.

[0203] In certain embodiments a “polypeptide variant” is provided. The term “polypeptide variant” refers to molecules which differ in their amino acid sequence from a native or reference sequence. The amino acid sequence variants may possess substitutions, deletions, and/or insertions at certain positions within the amino acid sequence, as compared to a native or reference sequence. Ordinarily, variants will possess at least about 50% identity (homology) to a native or reference sequence, and in certain embodiments, they will be at least about 80%, or at least about 90% identical (homologous) to a native or reference sequence.

[0204] The present disclosure comprises the use of formulated AAV particles whose vector genomes encode modulatory polynucleotides, e.g., RNA or DNA molecules as therapeutic agents. Accordingly, the present disclosure provides vector genomes which encode polynucleotides which are processed into small double stranded RNA (dsRNA) molecules (small interfering RNA, siRNA, miRNA, pre-miRNA) targeting a gene of interest. The present disclosure also provides methods of their use for inhibiting gene expression and protein production of an allele of the gene of interest, for treating diseases, disorders, and/or conditions.

[0205] In certain embodiments, the AAV particle comprises a viral genome with a payload region comprising a nucleic acid sequence encoding or comprising one or more modulatory polynucleotides. In certain embodiments, the AAV particle comprises a viral genome with a payload region comprising a nucleic acid sequence encoding a modulatory polynucleotide of interest. In certain embodiments of the present disclosure, modulatory polynucleotides, e.g, RNA or DNA molecules, are presented as therapeutic agents. RNA interference mediated gene silencing can specifically inhibit targeted gene expression.

[0206] In certain embodiments, the payload region comprises a nucleic acid sequence encoding a modulatory polynucleotide which interferes with a target gene expression and/or a target protein production. In certain embodiments, the gene expression or protein production to be inhibited/modified may comprise but are not limited to superoxide dismutase 1 (SOD1), chromosome 9 open reading frame 72 (C9ORF72), TAR DNA binding protein (TARDBP), ataxin-3 (ATXN3), huntingtin amyloid precursor protein (APP), apolipoprotein E (ApoE), microtubule-associated protein tau (MAPT), alpha-synuclein (SNCA), voltage-gated sodium channel alpha subunit 9 (SCN9A), and/or voltage-gated sodium channel alpha subunit 10 (SCN10A).

[0207] In certain embodiments, the AAV particle comprises a viral genome with a payload region comprising a nucleic acid sequence encoding any of the modulatory polynucleotides, RNAi molecules, siRNA molecules, dsRNA molecules, and/or RNA duplexes described in any one of the following International Publications: WO2016073693, WO2017023724, WO2016077687, WO2016077689, WO2018204786, WO2017201258, WO2017201248, WO2018204803, WO2018204797, WO2017189959, WO2017189963, WO2017189964, WO2015191508, WO2016094783, WO20160137949, WO2017075335; the contents of which are each incorporated herein by reference in their entireties insofar as they do not conflict with the present disclosure.

[0208] In certain embodiments, a nucleic acid sequence encoding such siRNA. molecules, or a single strand of the siRNA molecules, is inserted into adeno-associated viral vectors and introduced into cells, specifically cells in the central nervous system.

[0209] AAV particles have been investigated for siRNA delivery because of several unique features. Non-limiting examples of the features comprise (i) the ability to infect both dividing and non-dividing cells; (ii) a broad host range for infectivity, comprising human cells; (iii) wild-type AAV has not been associated with any disease and has not been shown to replicate in infected cells; (iv) the lack of cell-mediated immune response against the vector and (v) the non-integrative nature in a host chromosome thereby reducing potential for long-term expression. Moreover, infection with AAV particles has minimal influence on changing the pattern of cellular gene expression (Stilwell and Samulski et al., Biotechniques, 2003, 34, 148).

[0210] In certain embodiments, the encoded siRNA duplex of the present disclosure contains an antisense strand and a sense strand hybridized together forming a duplex structure, wherein the antisense strand is complementary to the nucleic acid sequence of the targeted gene of interest, and wherein the sense strand is homologous to the nucleic acid sequence of the targeted gene of interest. In other aspects, there are 0, 1 or 2 nucleotide overhangs at the 3′end of each strand.

[0211] The payloads of the formulated AAV particles of the present disclosure may encode one or more agents which are subject to RNA interference (RNAi) induced inhibition of gene expression. Provided herein are encoded siRNA duplexes or encoded dsRNA that target a gene of interest (referred to herein collectively as “siRNA molecules”). Such siRNA molecules, e.g., encoded siRNA duplexes, encoded dsRNA or encoded siRNA or dsRNA precursors can reduce or silence gene expression in cells, for example, astrocytes or microglia, cortical, hippocampal, entorhinal, thalamic, sensory or motor neurons.

[0212] RNAi (also known as post-transcriptional gene silencing (PIGS), quelling, or co-suppression) is a post-transcriptional gene silencing process in which RNA molecules, in a sequence specific manner, inhibit gene expression, typically by causing the destruction of specific mRNA molecules. The active components of RNAi are short/small double stranded RNAs (dsRNAs), called small interfering RNAs (siRNAs), that typically contain 15-30 nucleotides (e.g., 19 to 25, 19 to 24 or 19-21 nucleotides) and 2-nucleotide 3′ overhangs and that match the nucleic acid sequence of the target gene. These short RNA species may be naturally produced in vivo by Dicer-mediated cleavage of larger dsRNAs and they are functional in mammalian cells.

[0213] Naturally expressed small RNA molecules, known as microRNAs (miRNAs), elicit gene silencing by regulating the expression of mRNAs. The miRNAs containing RNA Induced Silencing Complex (RISC) targets mRNAs presenting a perfect sequence complementarity with nucleotides 2-7 in the 5′ region of the miRNA which is called the seed region, and other base pairs with its 3′ region. miRNA mediated down regulation of gene expression may he caused by cleavage of the target mRNAs, translational inhibition of the target mRNAs, or mRNA decay. miRNA targeting sequences are usually located in the 3′ UTR of the target mRNAs. A single miRNA may target more than 100 transcripts from various genes, and one mRNA may be targeted by different miRNAs.

[0214] siRNA duplexes or dsRNA targeting a specific mRNA may be designed as a payload of an AAV particle and introduced into cells for activating RNAi processes. Elbashir et al. demonstrated that 21-nucleotide siRNA duplexes (termed small interfering RNAs) were capable of effecting potent and specific gene knockdown without inducing immune response in mammalian cells (Elbashir S M et al., Nature, 2001, 411, 494-498), Since this initial report, post-transcriptional gene silencing by siRNAs quickly emerged as a powerful tool for genetic analysis in mammalian cells and has the potential to produce novel therapeutics.

[0215] The siRNA duplex comprised of a sense strand homologous to the target mRNA and an antisense strand that is complementary to the target mRNA offers much more advantage in terms of efficiency for target RNA destruction compared to the use of the single strand (ss)-siRNAs (e.g. antisense strand RNA or antisense oligonucleotides). In many cases it requires higher concentration of the ss-siRNA to achieve the effective gene silencing potency of the corresponding duplex.

[0216] In certain embodiments, the siRNA molecules may be encoded in a modulatory polynucleotide which also comprises a molecular scaffold. As used herein a “molecular scaffold” is a framework or starting molecule that forms the sequence or structural basis against which to design or make a subsequent molecule.

[0217] In certain embodiments, the modulatory polynucleotide which comprises the payload (e.g., siRNA, miRNA or other RNAi agent described herein) comprises molecular scaffold which comprises a leading 5′ flanking sequence which may be of any length and may be derived in whole or in part from wild type microRNA sequence or be completely artificial. A 3′ flanking sequence may mirror the 5′ flanking sequence in size and origin. In certain embodiments, one or both of the 5′ and 3′ flanking sequences are absent.

[0218] In certain embodiments, the molecular scaffold may comprise one or more linkers known in the art. The linkers may separate regions or one molecular scaffold from another. As a non-limiting example, the molecular scaffold may be polycistronic.

[0219] In certain embodiments, the modulatory polynucleotide is designed using at least one of the following properties: loop variant, seed mismatch/bulge/wobble variant, stern mismatch, loop variant and basal stem mismatch variant, seed mismatch and basal stem mismatch variant, stem mismatch and basal stem mismatch variant, seed wobble and basal stem wobble variant, or a stem sequence variant.

### Payloads: Polypeptides and Variants

[0220] In certain embodiments, the payload region of the AAV particle comprises one or more nucleic acid sequences encoding a polypeptide or protein of interest.

[0221] In certain embodiments, the AAV particle comprises a viral genome with a payload region comprising nucleic acid sequences encoding more than one polypeptide of interest. In certain embodiments, a viral genome encoding one or more polypeptides may be replicated and packaged into a viral particle. A target cell transduced with a viral particle comprising the vector genome may express each of the one or more polypeptides in the single target cell.

[0222] Where the AAV particle payload region encodes a polypeptide, the polypeptide may be a peptide, polypeptide or protein. As a non-limiting example, the payload region may encode at least one therapeutic protein of interest. The AAV viral genomes encoding polypeptides described herein may be useful in the fields of human disease, viruses, infections veterinary applications and a variety of in vivo and in vitro settings.

[0223] In certain embodiments, administration of the formulated AAV particles (which comprise the viral genome) to a subject will increase the expression of a protein in a subject. In certain embodiments, the increase of the expression of the protein will reduce the effects and/or symptoms of a disease or ailment associated with the polypeptide encoded by the payload.

[0224] In certain embodiments, the formulated AAV particles of the present disclosure may be used to reduce the decline of functional capacity and activities of daily living as measured by a standard evaluation system such as, but not limited to, the total functional capacity (TFC) scale.

[0225] In certain embodiments, the AAV particle comprises a viral genome with a payload region comprising a nucleic acid sequence encoding a protein of interest (i.e. a payload protein, therapeutic protein).

[0226] In certain embodiments, the payload region comprises a nucleic acid sequence encoding a protein comprising but not limited to an antibody, Aromatic L-Amino Acid Decarboxylase (AADC), ApoE2, Frataxin, survival motor neuron (SMN) protein, glucocerebrosidase, N-sulfogiucosamine sulfohydmlase, N-acetyl-alpha-alucosaminidase, iduronate 2-sulfatase, alpha-L-iduronidase, palmitoyl-protein thioesterase 1, tripeptidyl peptidase 1, battenin, CLN5, CLN6 (linclin), MFSD8, CLN8, aspanoacylase (ASPA), progranulin (GRN), MeCP2, beta-galactosidase (GLB 1) and/or gigaxonin (GAN).

[0227] In certain embodiments, the AAV particle comprises a viral genome with a payload region comprising a nucleic acid sequence encoding AADC or any other payload known in the art for treating Parkinson's disease, As a non-limiting example, the payload may comprise a sequence such as NM_001082971.1 (GI: 132814447), NM_000790.3 (GI: 132814459), NM_001242886.1 (GI: 338968913), NM_001242887.1 (GI: 338968916), NM_001242888.1 (GI: 338968918), NM_001242889.1 (GI: 338968920), NM_001242890.1 (GI: 338968922) and fragment or variants thereof

[0228] In certain embodiments, the AAV particle comprises a viral genome with a payload region comprising a nucleic acid sequence encoding frataxin or any other payload known in the art for treating Friedreich's Ataxia. As a non-limiting example, the payload may comprise a sequence such as NM_000144.4 (GI: 239787167), NM_181425. (GI: 239787185), NM_001161706.1 (GI: 239787197) and fragment or variants thereof.

[0229] In certain embodiments, the AAV particle comprises a viral genome with a payload region comprising a nucleic acid sequence encoding SMN or any other payload known in the art for treating spinal muscular atrophy (SMA). As a non-limiting example, the payload may comprise a sequence such as NM_001297715.1 (GI: 663070993), NM_000344.3 (GI: 196115055), NM_022874.2 (GI: 196115040) and fragment or variants thereof.

[0230] In certain embodiments, the AAV particle comprises a viral genome with a payload region comprising a nucleic acid sequence encoding any of the disease-associated proteins (and fragment or variants thereof) described in U.S. Patent publication No. 20180258424; the content of which is herein incorporated by reference in its entirety.

[0231] In certain embodiments, the AAV particle comprises a viral genome with a payload region comprising a nucleic acid sequence encoding any of the disease-associated proteins (and fragment or variants thereof) described in any one of the following International Publications: WO2016073693, WO2017023724, WO2016077687, WO2016077689, WO2018204786, WO2017201258, WO2017201248, WO2018204803, WO2018204797, WO2017189959, WO2017189963, WO2017189964, WO2015191508, WO2016094783, WO20160137949, WO2017075335; the contents of which are each herein incorporated by reference in their entirety.

[0232] In certain embodiments, the formulated AAV particles of the present disclosure may be used to improve performance on any assessment used to measure symptoms of a neurodegenerative disorder/disease. Such assessments comprise, but are not limited to ADAS-cog (Alzheimer Disease Assessment Scale—cognitive), NIMSE (Mini-Mental State Examination), GDS (Geriatric Depression Scale). FAQ (Functional Activities Questionnaire), AM, (Activities of Daily Living), GPCOG (General Practitioner Assessment of Cognition), Mini-Cog, AMTS (Abbreviated Mental Test Score), Clock-drawing test, 6-CIT (6-item Cognitive Impairment Test), TYM (Test Your Memory), MoCa (Montreal Cognitive Assessment), ACE-R (Addenbrookes Cognitive Assessment), MIS (Memory Impairment Screen), BADLS (Bristol Activities of Daily Living Scale), Barthel Index, Functional Independence Measure. Instrumental Activities of Daily Living, IQCODE (Informant Questionnaire on Cognitive Decline in the Elderly). Neuropsychiatric Inventory, The Cohen-Mansfield Agitation Inventory, BEHAVE-AD, EuroQol, Short Form-36 and/or MBR Caregiver Strain Instrument, or any of the other tests as described in Sheehan B Ther Adv Neurol Disord 5(6):349-358 (2012), the contents of which are herein incorporated by reference in their entirety.

[0233] In certain embodiments “variant mimics” are provided. As used herein, the term “variant mimic” is one which contains one or more amino acids which would mimic an activated sequence. For example, glutamate may serve as a mimic for phosphoro-threonine and/or phosphoro-serine. Alternatively, variant mimics may result in deactivation or in an inactivated product containing the mimic, e.g., phenylalanine may act as an inactivating substitution for tyrosine; or alanine may act as an inactivating substitution for serine.

[0234] In certain embodiments an “amino acid sequence variant” is provided. The term “amino acid sequence variant” refers to molecules with some differences in their amino acid sequences as compared to a native or starting sequence. The amino acid sequence variants may possess substitutions, deletions, and/or insertions at certain positions within the amino acid sequence. “Native” or “starting” sequence should not he confused with a wild type sequence. As used herein, a native or starting sequence is a relative term referring to an original molecule against which a comparison may be made. “Native” or “starting” sequences or molecules may represent the wild-type (that sequence found in nature) but do not have to be the wild-type sequence.

[0235] Ordinarily, variants will possess at least about 70% homology to a native sequence, and in certain embodiments, they will be at least about 80% or at least about 90% homologous to a native sequence. “Homology” as it applies to amino acid sequences is defined as the percentage of residues in the candidate amino acid sequence that are identical with the residues in the amino acid sequence of a second sequence after aligning the sequences and introducing gaps, if necessary, to achieve the maximwn percent homology. Methods and computer programs for the alignment are well known in the art. It is understood that homology depends on a calculation of percent identity but may differ in value due to gaps and penalties introduced in the calculation.

[0236] By “homologs” as it applies to amino acid sequences is meant the corresponding sequence of other species having substantial identity to a second sequence of a second species.

[0237] “Analogs” is meant to comprise polypeptide variants which differ by one or more amino acid alterations, e.g., substitutions, additions or deletions of amino acid residues that still maintain the properties of the parent polypeptide.

[0238] Sequence tags or amino acids, such as one or more lysines, can be added to the peptide sequences of the disclosure (e.g., at the N-terminal or C-terminal ends). Sequence tags can he used for peptide purification or localization. Lysines can be used to increase peptide solubility or to allow for biotinylation. Alternatively, amino acid residues located at the carboxy and amino terminal regions of the amino acid sequence of a peptide or protein may optionally be deleted providing for truncated sequences. Certain amino acids (e.g., C-terminal or N-terminal residues) may alternatively he deleted depending on the use of the sequence, as for example, expression of the sequence as part of a larger sequence which is soluble or linked to a solid support.

[0239] In certain embodiments a “substitutional variant” is provided. “Substitutional variants” when referring to proteins are those that have at least one amino acid residue in a native or starting sequence removed and a different amino acid inserted in its place at the same position. The substitutions may be single, where only one amino acid in the molecule has been substituted, or they may be multiple, where two or more amino acids have been substituted in the same molecule.

[0240] As used herein the term “conservative amino acid substitution” refers to the substitution of an amino acid that is normally present in the sequence with a different amino acid of similar size, charge, or polarity. Examples of conservative substitutions comprise the substitution of a non-polar (hydrophobic) residue such as isoleucine, valine and leucine for another non-polar residue. Likewise, examples of conservative substitutions comprise the substitution of one polar (hydrophilic) residue for another such as between arginine and lysine, between glutamine and asparagine, and between glycine and serine. Additionally, the substitution of a basic residue such as lysine, arginine or histidine for another, or the substitution of one acidic residue such as aspartic acid or glutamic acid for another acidic residue are additional examples of conservative substitutions. Examples of non-conservative substitutions comprise the substitution of a non-polar (hydrophobic) amino acid residue such as isoleucine, valine, leucine, alanine, methionine for a polar (hydrophilic) residue such as cysteine, glutamine, glutamic acid or lysine and/or a polar residue for a non-polar residue.

[0241] In certain embodiments an “insertional variant” is provided. “Insertional variants” when referring to proteins are those with one or more amino acids inserted immediately adjacent to an amino acid at a particular position in a native or starting sequence. “Immediately adjacent” to an amino acid means connected to either the alpha-carboxy or alpha-amino functional group of the amino acid.

[0242] In certain embodiments a “deletional variant” is provided. “Deletional variants” when referring to proteins, are those with one or more amino acids in the native or starting amino acid sequence removed. Ordinarily, deletional variants will have one or more amino acids deleted in a particular region of the molecule.

[0243] As used herein, the term “derivative” is used synonymously with the term “variant” and refers to a molecule that has been modified or changed in any way relative to a reference molecule or starting molecule. In certain embodiments, derivatives comprise native or starting proteins that have been modified with an organic proteinaceous or non-proteinaceous derivatizing agent, and post-translational modifications. Covalent modifications are traditionally introduced by reacting targeted amino acid residues of the protein with an organic derivatizing agent that is capable of reacting with selected side-chains or terminal residues, or by harnessing mechanisms of post-translational modifications that function in selected recombinant host cells. The resultant covalent derivatives are useful in programs directed at identifying residues important for biological activity, for immunoassays, or for the preparation of anti-protein antibodies for immunoaffinity purification of the recombinant glycoprotein. Such modifications are within the ordinary skill in the art and are performed without undue experimentation.

[0244] Certain post-translational modifications are the result of the action of recombinant host cells on the expressed polypeptide. Glutaminyl and asparaginyl residues are frequently post-translationally deamidated to the corresponding glutamyl and aspartylresidues. Alternatively, these residues are deamidated under mildly acidic conditions. Either form of these residues may be present in the proteins used in accordance with the present disclosure.

[0245] Other post-translational modifications comprise hydroxylation of proline and lysine, phosphorylation of hydroxyl groups of seryl or threonyl residues, methylation of the alpha-amino groups of lysine, arginine, and histidine side chains (T. E. Creighton, Proteins: Structure and Molecular Properties, W.H. Freeman & Co., San Francisco, pp. 79-86 (1983)).

[0246] “Features” when referring to proteins are defined as distinct amino acid sequence-based components of a molecule. Features of the proteins of the present disclosure comprise surface manifestations, local conformational shape, folds, loops, half-loops, domains, half-domains, sites, termini or any combination thereof.

[0247] As used herein when referring to proteins the term “surface manifestation” refers to a polypeptide-based component of a protein appearing on an outermost surface.

[0248] As used herein when referring to proteins the term “local conformational shape” means a polypeptide based structural manifestation of a protein which is located within a definable space of the protein.

[0249] As used herein when referring to proteins the term “fold” means the resultant conformation of an amino acid sequence upon energy minimization. A fold may occur at the secondary or tertiary level of the folding process. Examples of secondary level folds comprise beta sheets and alpha helices. Examples of tertiary folds comprise domains and regions formed due to aggregation or separation of energetic forces. Regions formed in this way comprise hydrophobic and hydrophilic pockets, and the like.

[0250] As used herein the terns “turn” as it relates to protein conformation means a bend which alters the direction of the backbone of a peptide or polypeptide and may involve one, two, three or more amino acid residues.

[0251] As used herein when referring to proteins the term “loop” refers to a structural feature of a peptide or polypeptide which reverses the direction of the backbone of a peptide or polypeptide and comprises four or more amino acid residues. Oliva et al. have identified at least 5 classes of protein loops (J. Mol Biol 266 (4): 814-830; 1997).

[0252] As used herein when referring to proteins the term “half-loop” refers to a portion of an identified loop having at least half the number of amino acid residues as the loop from which it is derived. It is understood that loops may not always contain an even number of amino acid residues. Therefore, in those cases where a loop contains or is identified to comprise an odd number of amino acids, a half-loop of the odd-numbered loop will comprise the whole number portion or next whole number portion of the loop (number of amino acids of the loop/2+/−0.5 amino acids). For example, a loop identified as a 7 amino acid loop could produce half-loops of 3 amino acids or 4 amino acids (7/2=3.5+1−0.5 being 3 or 4).

[0253] As used herein when referring to proteins the term “domain” refers to a motif of a polypeptide having one or more identifiable structural or functional characteristics or properties (e.g., binding capacity, serving as a site for protein-protein interactions).

[0254] As used herein when referring to proteins the term “half-domain” means portion of an identified domain having at least half the number of amino acid residues as the domain from which it is derived. It is understood that domains may not always contain an even number of amino acid residues. Therefore, in those cases where a domain contains or is identified to comprise an odd number of amino acids, a half-domain of the odd-numbered domain will comprise the whole number portion or next whole number portion of the domain (number of amino acids of the domain/2+/−0.5 amino acids). For example, a domain identified as a 7 amino acid domain could produce half-domains of 3 amino acids or 4 amino acids (7/2=3.5+/−0.5 being 3 or 4). It is also understood that sub-domains may be identified within domains or half-domains, these subdomains possessing less than all of the structural or functional properties identified in the domains or half domains from which they were derived. It is also understood that the amino acids that comprise any of the domain types herein need not be contiguous along the backbone of the polypeptide (i.e., nonadjacent amino acids may fold structurally to produce a domain, half-domain or subdomain).

[0255] As used herein when referring to proteins the terms “site” as it pertains to amino acid -based embodiments is used synonymous with “amino acid residue” and “amino acid side chain”. A site represents a position within a peptide or polypeptide that may be modified, manipulated, altered, derivatized or varied within the polypeptide-based molecules of the present disclosure.

[0256] As used herein the terms “termini or terminus” when referring to proteins refers to an extremity of a peptide or polypeptide. Such extremity is not limited only to the first or final site of the peptide or polypeptide but may comprise additional amino acids in the terminal regions. The polypeptide-based molecules of the present disclosure may be characterized as having both an N-terminus (terminated by an amino acid with a free amino group (NH2)) and a C-terminus (terminated by an amino acid with a free carboxyl group (COOH)). Proteins of the disclosure are in certain embodiments made up of multiple polypeptide chains brought together by disulfide bonds or by non-covalent forces (multimers. oligomers). These sorts of proteins will have multiple N- and C-termini. Alternatively, the termini of the polypeptides may he modified such that they begin or end, as the case may be, with a non-polypeptide-based moiety such as an organic conjugate.

[0257] Once any of the features have been identified or defined as a component of a molecule of the disclosure, any of several manipulations and/or modifications of these features may be performed by moving, swapping, inverting, deleting, randomizing or duplicating. Furthermore, it is understood that manipulation of features may result in the same outcome as a modification to the molecules of the disclosure. For example, a manipulation which involves deleting a domain would result in the alteration of the length of a molecule just as modification of a nucleic acid to encode less than a full-length molecule would.

[0258] Modifications and manipulations can be accomplished by methods known in the art such as site directed mutagenesis. The resulting modified molecules may then be tested for activity using in vitro or in vivo assays such as those described herein or any other suitable screening assay known in the art.

### Payloads: Modulatoty Polynucleotides Targeting a Gene of Interest

### General

[0259] In certain embodiments, the present disclosure presents the use of formulated AAV particles whose vector genomes encode modulatory polynucleotides, e.g., RNA or DNA molecules as therapeutic agents. Accordingly, the present disclosure provides vector genomes which encode polynucleotides which are processed into small double stranded RNA (dsRNA) molecules (small interfering RNA, siRNA, pre-miRNA) targeting a gene of interest. The present disclosure also provides methods of their use for inhibiting gene expression and protein production of an allele of the gene of interest, for treating diseases, disorders, and/or conditions.

[0260] In certain embodiments, the AAV particle comprises a viral genome with a payload region comprising a nucleic acid sequence encoding or comprising one or more modulatory polynucleotides. In certain embodiments, the AAV particle comprises a viral genome with a payload region comprising a nucleic acid sequence encoding a modulatory polynucleotide of interest. In certain embodiments of the present disclosure, modulatory polynucleotides, e.g., RNA or DNA molecules, are presented as therapeutic agents. RNA interference mediated gene silencing can specifically inhibit targeted gene expression.

[0261] In certain embodiments, the payload region comprises a nucleic acid sequence encoding a modulatory polynucleotide which interferes with a target gene expression and/or a target protein production. In certain embodiments, the gene expression or protein production to be inhibited/modified may comprise but are not limited to superoxide dismutase 1 (SOD1), chromosome 9 open reading frame 72 (C9OR1⁷72), TAR DNA binding protein (TARDBP), ataxin-3 (ATXN3), huntingtin (FITT), amyloid precursor protein (APP), apolipoprotein E (ApoE), microtubule-associated protein tau (MAPT), alpha-synuclein (SNCA.), voltage-gated sodium channel alpha subunit 9 (SCN9A), and/or voltage-gated sodium channel alpha subunit 10 (SCN10A).

[0262] The present disclosure provides small interfering RNA (siRNA) duplexes (and modulatory polynucleotides encoding them) that target SOD1 mRNA to interfere with the gene expression and/or protein production of SOD1. The present disclosure also provides methods of their use for inhibiting gene expression and protein production of an allele of SOD1, for treating amyotrophic lateral sclerosis (ALS). In certain embodiments, the siRNA duplexes of the present disclosure may target SOD1 along any segment of the respective nucleotide sequence. In certain embodiments, the siRNA duplexes of the present disclosure may target SOD1 at the location of a SNP or variant within the nucleotide sequence.

[0263] The present disclosure provides small interfering RNA (siRNA) duplexes (and modulatory polynucleotides encoding them) that target HTT mRNA to interfere with the gene expression and/or protein production of HIT. The present disclosure also provides methods of their use for inhibiting gene expression and protein production of an allele of HTT, for treating Huntington's disease (HD). In certain embodiments, the siRNA duplexes of the present disclosure may target HTT along any segment of the respective nucleotide sequence. In certain embodiments, the siRNA duplexes of the present disclosure may target HIT at the location of a SNP or variant within the nucleotide sequence,

[0264] In certain embodiments, the AAV particle comprises a viral genome with a payload region comprising a nucleic acid sequence encoding any of the modulatory polynucleotides, RNAi molecules, siRNA molecules, dsRNA molecules, and/or RNA duplexes described in any one of the following international Publications: WO2016073693, WO2017023724, WO2016077687, WO2016077689, WO2018204786, WO2017201258, WO2017201248, WO2018204803, WO2018204797, WO2017189959, WO2017189963, WO2017189964, WO2015191508, WO2016094783, WO20160137949, WO2017075335; the contents of which are each herein incorporated by reference in their entirety.

[0265] In certain embodiments, a nucleic acid sequence encoding such siRNA molecules, or a single strand of the siRNA molecules, is inserted into adeno-associated viral vectors and introduced into cells, specifically cells in the central nervous system.

[0266] AAV particles have been investigated for siRNA delivery because of several unique features. Non-limiting examples of the features comprise (i) the ability to infect both dividing and non-dividing cells; (ii) a broad host range for infectivity, comprising human cells; (iii) AAV has not been associated with any disease and has not been shown to replicate in infected cells; (iv) the lack of cell-mediated immune response against the vector and (v) the non-integrative nature in a host chromosome thereby reducing potential for long-term expression. Moreover, infection with AAV particles has minimal influence on changing the pattern of cellular gene expression (Stilwell and Samulski et al., Biotechniques, 2003, 34, 148).

[0267] In certain embodiments, the encoded siRNA duplex of the present disclosure contains an antisense strand and a sense strand hybridized together forming a duplex structure, wherein the antisense strand is complementary to the nucleic acid sequence of the targeted gene of interest, and wherein the sense strand is homologous to the nucleic acid sequence of the targeted gene of interest. In other aspects, there are 0, 1 or 2 nucleotide overhangs at the 3′ end of each strand.

[0268] According to the present disclosure, each strand of the siRNA duplex targeting the gene of interest can be about 19 to 25, 19 to 24 or 19 to 21 nucleotides in length, such as about 19 nucleotides, 20 nucleotides, 21 nucleotides, 22 nucleotides, 23 nucleotides, 24 nucleotides, or 25 nucleotides in length.

[0269] In certain embodiments, an siRNA or dsRNA comprises at least two sequences that are complementary to each other. The dsRNA comprises a sense strand having a first sequence and an antisense strand having a second sequence. The antisense strand comprises a nucleotide sequence that is substantially complementary to at least part of an mRNA encoding a gene of interest, and the region of complementarity is 30 nucleotides or less, and at least 15 nucleotides in length. Generally, the dsRNA is 19 to 25, 19 to 24 or 19 to 21 nucleotides in length. In certain embodiments, the dsRNA is from about 15 to about 25 nucleotides in length, and in certain embodiments the dsRNA is from about 25 to about 30 nucleotides in length.

[0270] The dsRNA encoded in an expression vector upon contacting with a cell expressing protein encoded by the gene of interest, inhibits the expression of protein encoded by the gene of interest by at least 10%, at least 20%, at least 25%, at least 30%, at least 35%, at least 40%, at least 50%, at least 60%, at least 70%, at least 80%, or more, when assayed by methods known in the art or a method as described herein.

[0271] According to the present disclosure, formulated AAV particles comprising the nucleic acids of the siRNA duplexes, one strand of the siRNA duplex or the dsRNA targeting the gene of interest are produced, the AAV particle serotypes may be PHP.B, PHPA, G2B-26, G2B-13, TH1.1-32, TH1.1-35, AAV1, AAV2, AAV2G9, AAV3, AAV3a, AAV3b, AAV3-3, AAV4, AAV4-4, AAV5, AAV6, AAV6.1, AAV6.2, AAV6.1.2, AAV7, AAV7.2, AAV8, AAV9, AAV9.11, AAV9.13, AAV9.16, AAV9.24, AAV9.45, AAV9.47, AAV9.61, AAV9.68, AAV9.84, AAV9.9, AAV10, AAV11, AAV12, AAV16.3, AAV24.1, AAV27.3, AAV42,12, AAV42-1b, AAV42-2, AAV42-3a, AAV42-3b, AAV42-4, AAV42-5a, AAV42-5b, AAV42-6b, AAV42-8, AAV42, AAV42-11, AAV42-12, AAV42-13, AAV42-15, AAV42-aa, AAV43-1, AAV43-12, AAV43-20, AAV43-21, AAV43-23, AAV43-25, AAV43-5, AAV44.1, AAV44.2, AAV44.5, AAV223.1, AAV223,2, AAV223.4, AAV223.5, AAV223.6, AAV223.7, AAV1-7/rh.48, AAV1-8/rh.49, AAV2-15/rh.62, AAV2-3/rh.61, AAV2-4/rh.50, AAV2-5/rh.51, AAV3.1/hu.6, AAV3.1/hu.9, AAV3-9/rh.52, AAV3-11/rh.53, AAV4-8/r11.64, AAV4-9/rh.54, AAV4-19/rh.55, AAV5-3/rh,57, AAV5-22/rh.58, AAV7.3/hu.7, AAV16.8/hu.10, AAV16.12/hu.11, AAV29.3/bb.1, AAV29,5/bb.2, AAV106.1/hu.37, AAV114.3/hu.40, AM/127.2/1m.41, AAV127.5/hu.42, AAV128.3/hu.44, AAV130.4/hu.48, AAV145.1/hu.53, AAV145.5/hu.54, AAV145.6/hu.55, AAV161.10/hu.60, AAV1.61.6/hu.61, AAV33.12/hu.17, AAV33.4/hu.15, AAV33.8/hu.16, AAV52/hu.19, AAV52.1/hu.20, AAV58.2/hu.25, AAVA3.3, AAVA3.4, AAVA3.5, AAVA3.7, AAVC1, AAVC2, AAVC5, AAV-DJ, AAV-DJ8, AAVF3, AAVF5, AAVH2, AAVrh.72, AAVhu.8, AAVrh.68, AAVrh.70, AAVpi.1, AAVpi.3, AAVpi.2, AAVrh.60, AAVrh.44, AAVrh.65, AAVrh,55, AAVrh.47, AAVrh.69, AAVrh.45, AAVrh.59, AAVhu.12, AAVH16, AAVLK03, AAVH-1/hu.1, AAVH5/hu.3, AAVLG-10/rh.40, AAVLG-4/rh.38, AAVLG-9/hu.39, AAVN721-8/rh.43, AAVCh.5, AAVCh.5R1, AAVcy.2, AAVcy.3, AAVcy.4, AAVcy.5, AAVCy.5R1, AAVCy.5R2, AAVCy.5R3, AAVCy.5R4, AAVcy6, AAVhu.1, AAVhu.2, AAVhu.3, AAVhu.4, AAVhu.5. AAVhu.6, AAVhu.7, AAVhu.9, AAVhu.10, AAVhu.11, AAVhu.13, AAVhu.15, AAVhu.16, AAVhu.17, AAVhu.18, AAVhu.20, AAVhu.21, AAVhu.22, AAVhu,23.2, AAVhu.24, AAVhu.25, AAVhu.27, AAVhu.28, AAVhu.29, AAVhu.29R, AAVhu.31, AAVhu.32, AAVhu.34, AAVhu.35, AAVhu.37, AAVhu.39, AAVhu.40, AAVhu.41, AAVhu.42, AAVhu.43, AAVhu.44, AAVhu.44R1, AAVhu.44R2, AAVhu.44R3, AAVhu.45, AAVhu.46, AAVhu.47, AAVhu.48, AAVhu.48R1, AAVhu.48R2, AAVhu.48R3, AAVhu.49, AAVhu.51, AAVhu.54, AAVhu.55, AAVhu.56, AAVhu.57, AAVhu.58, AAVhu.60, AAVhu.61, AAVhu.63, AAVhu.64-AAVhu.66, AAVhu.67, AAVhu.14/9, AAVhu.t 19, AAVrh.2, AAVrh.2R, AAVrh.8, AAVrh.8R, AAVrh.10, AAVrh.12, AAVrh.13, AAVrh.13R, AAVrh.14, AAVrh.17, AAVrh.18, AAVrh.19, AAVrh.20, AAVrh.21, AAVrh.22, AAVrh.23, AAVrh.24, AAVrh.25, AAVrh.31, AAVrh.32, AAVrh.33, AAVrh.34, AAVrh.35, AAVrh.36, AAVrh.37, AAVrh.37R2, AAVrh.38, AAVrh.39, AAVrh.40, AAVrh.46, AAVrh.48, AAVrh.48.1, AAVrh.48.1.2, AAVrh.48.2, AAVrh.49, AAVrh.51, AAVrh.52, AAVrh.53, AAVrh.54, AAVrh.56, AAVrh.57, AAVrh.58, AAVrh.61, AAVrh.64, AAVrh.64R1, AAVrh.64R2, AAVrh.67, AAVrh.73, AAVrh.74, AAVrh8R, AAVrh8R A586R mutant, AAVrh8R R533A mutant, AAAV, BAAV, caprine AAV, bovine AAV, ovine AAV, AAVhE1.1, AAVhEr1.5, AAVhER1.14, AAVhEr1.8, AAVhEr1.16, AAVhEr1.18, AAVhEr1.35, AAVhEr1.7, AAVhEr1.36, AAVhEr2.29, AAVhEr2.4, AAVhEr2.16, AAVhEr2.30, AAVhEr2.31, AAVhEr2.36, AAVhER1.23, AAVhEr3.1, AAV2.5T , AAV-PAEC, AAV-LK01, AAV-LK02, AAV-LK03, AAV-LK04, AAV-LK05, AAV-LK06, AAV-LK07, AAV-LK08, AAV-LK09, AAV-LK10, AAV-LK11, AAV-LK12, AAV-LK13, AAV-LK14, AAV-LK16, AAV-LK AAV-LK18, AAV-LK19, AAV-PAEC2, AAV-PAEC4, AAV-PAEC6, AAV-PAEC7, AAV-PAEC8, AAV-PAEC11, AAV-PAEC12, AAV-2-pre-miRNA-101 , AAV-8h, AAV-8b, AAV-h, AAV-b, AAV SM 10-2, AAV Shuffle 100-1 , AAV Shuffle 100-3, AAV Shuffle 100-7-NAV Shuffle 10-2. AAV Shuffle 10-6, AAV Shuffle 10-8. AAV Shuffle 100-2, AAV SM 10-1. AAV SM 10-8 , AAV SM 100-3, AAV SM 100-10, BNP61 AAV, BNP62 AAV, BNP63 AAV, AAVrh.50, AAVrh.43, AAVrh.62, AAVrh.48, AAVhu.19, AAVhu.53, AAV4-8/rh.64, AAVLG-9/hu.39, AAV54.5/hu.23, AAV54.2/hu.22, AAV54.7/hu.24, AAV54.1/hu.21, AAV54.4R/hu.27, AAV46.2/hu.28, AAV46.6/hu.29, AAV128.1/hu.43, true type AAV (ttAAV), UPENN AAV 10, Japanese AAV 10 serotypes. AAV CBr-7.1, AAV CBr-7.10, AAV C9r-7.2,NAV CBr-7.3, AAV CBr-7.4, AAV CBr-7.5, AAV CBr-7.7, AAV CBr-7.8 AAV CBr-B7.3, AAV CBr-B7.4, AAV CBr-E1l, AAV CBr-E2, AAV CBr-E3, AAV CBr-E4, AAV CBr-E5, AAV CBr-e5, AAV CBr-E6, AAV CBr-E7, AAV CBr-E8, AAV CHt-1, AAV CHt-2, AAV CHt-3, AAV CHt-6.1, AAV CHt-6.10, AAV CHt-6.5, AAV CHt-6.6, AAV CHt-6.7, AAV CHt-6.8, AAV CHt-P1, AAV CHt-P2, AAV CHt-P5, AAV CHt-P6, AAV CHt-P8, AAV CHt-P9, AAV CKd-1, AAV CKd-10, AAV CKd-2, AAV CKd-3, AAV CKd-4, AAV CKd-6, AAV CKd-7, AAV CKd-8, AAV CKd-B1, AAV CKd-B2, AAV CKd-B3, AAV CKd-B4, AAV CKd-B5, AAV CKd.-136, AAV CKd.-B7,NAV CKd.-138, AAV CKd-H1, CKd-H2, AAV CKd-H3, AAV CKd-H4, AAV CKd-H5, AAV CKd-H6, AAV CKd-N3, AAV CKd-N4, AAV CKd-N9, AAV CLg-F1, AAV AAV CLg-F3, AAV CLg-F4, AAV CLg-F5, AAV CLg-F6, AAV CLg-F7, AAV CLg-F8, AAV AAV CLv1-1, AAV Clv1-10, AAV CLv1-12, AAV CLv1-3,AAV CLv-13, AAV CLv1-4, AAV Clv1-7, AAV Clv1-8, AAV Clv1-9, AAV CLv-2, AAV CLv-3, AAV CLv-4, AAV CLv-6, AAV CLv-8, AAV CLv-D1, AAV CLv-D2, AAV CLv-D3, AAV CLv-D4, AAV CLv-D5, AAV CLv-D6, AAV CLv-D7, AAV CLv-D8, AAV CLv-E1, AAV CLv-K1, AAV CLv-K3, AAV CLv-K6, AAV CLv-L4, AAV CLv-L5, AAV CLv-L6, AA CLv-M1, AAV CLv-M11, AAV CLv-M2, AAV CLv-M5, AAV CLv-M6, AAV CLv-M7, AAV CLv-M8, AAV CLv-M9, AAV CLv-R1, AAV CLv-R2, AAV CLv-R3, AAV CLv-R4, AAV CLv-R5, AAV CLv-R6, AAV CLv-R7, AAV CLv-R8, AAV CLv-R9, AAV CSp-1, AAV CSp-10, AAV CSp-11, AAV CSp-2, AAV CSp-3, AAV CSp-4, AAV CSp-6, AAV CSp-7, AAV CSp-8, AAV CSp-8.10, AAV CSp-8.2, AAV CSp-8.4, AAV CSp-8.5, AAV CSp-8.6, AAV CSp-8.7, AAV CSp-8.8, AAV CSp-8.9, AAV CSp-9, AAV.hu.48R3, AAV.VR-355, AAV3B, AAV4, AAV5, AAVF1/HSC1, AAVF11/HSC11, AAVF12/HSC12, AAVF13/HSC13, AAVF14/HSC14, AAVF15/HSC15, AAVF16/HSC16, AAVF17/HSC17, AAVF2/HSC2, AAVF3/HSC3, AAVF4/HSC4, AAVF5/HSC5, AAVF6/1-HSC6, AAVF7/HSC7, AAVF8/HSC8, and/or AAVF9/HSC9 and variants thereof.

[0272] According to the present disclosure, the siRNA molecules arc designed and tested for their ability in reducing inRNA levels in cultured cells.

[0273] In certain embodiments, the siRNA molecules are designed and tested for their ability in reducing levels of the gene of interest in cultured cells.

[0274] The present disclosure also provides pharmaceutical compositions comprising at least one siRNA duplex targeting the gene of interest and a pharmaceutically acceptable carrier. In some aspects, the siRNA duplex is encoded by a vector genome in an AAV particle.

[0275] In certain embodiments, the present disclosure provides methods for inhibiting/silencing gene expression in a cell. In some aspects, the inhibition of gene expression refers to an inhibition by at least about 20%, such as by at least about 30%, 40%. 50%, 60%, 70%, 80%, 85%, 90%, 95% and 100%, or at least 20-30%, 20-40%, 20-50%, 20-60%, 20-70%, 20-80%, 20-90%, 20-95%, 20-100%, 30-40%, 35-40%, 30-50%, 30-60%, 30-70%, 30-80%, 30-90%, 30-95%, 30-100%, 40-50%, 40-60%, 40-70%, 40-80%, 40-90%, 40-95%, 40-100%, 50-60%, 50-70%, 50-80%, 50-90%, 50-95%, 50-100%, 60-70%, 60-80%, 60-90%, 60-95%, 60-100%, 70-80%, 70-90%, 70-95%, 70-100%, 80-90%, 80-95%, 80-100%. 90-95%, 90-100% or 95-100%. Accordingly, the protein product of the targeted gene may be inhibited by at least about 20%, such as by at least about 30%, 40%, 50©′0 60%, 70%. 80%, 85%, 90%, 95% and 100%, or at least 20-30%, 20-40%, 20-50%, 20-60%, 20-70%, 20-80%, 20-90%, 20-95%, 20-100%, 30-40%, 30-50%, 30-60%, 30-70%, 30-80%, 30-90%, 30-95%, 30-100%, 40-50%, 40-60%, 40-70%, 40-80%, 40-90%, 40-95%, 40-100%, 50-60%, 50-70%, 50-80%, 50-90%, 50-95%, 50-100%, 60-70%, 60-80%, 60-90%, 60-95%, 60-100%, 70-80%, 70-90%, 70-95%, 70-100%, 80-90%, 80-95%, 80-100%, 90-95%, 90-100% or 95-100%.

[0276] In certain embodiments, the encoded siRNA duplexes may be used to reduce the expression of protein encoded by the gene of interest by at least about 20%, 30%, 40%, 50%, 60%, 70%, 80%, 85%, 90%, 95% and 100%, or at least 20-30%, 20-40%, 20-50%, 20-60%, 20-70%, 20-80%, 20-90%, 20-95%, 20-100%, 30-40%, 35-40%, 30-50%, 30-60%, 30-70%, 30-80%, 30-90%, 30-95%, 30-100 40-50%, 40-60%, 40-70%, 40-80%, 40-90%, 40-95%, 40-100%, 50-60%, 50-70%, 50-80%, 50-90%, 50-95%, 50-100%, 60-70%, 60-80%, 60-90%. 60-95%, 60-100%, 70-80%, 70-90%, 70-95%, 70-100%, 80-90%, 80-95%, 80-100%, 90-95%, 90-100% or 95-100%. As a non-limiting example, the expression of protein may be reduced 50-90%. As a non-limiting example, the expression of protein may be reduced 30-70%. As a non-limiting example, the expression of protein may he reduced 40-70%.

[0277] In certain embodiments, the encoded siRNA duplexes may be used to reduce the expression of mRNA transcribed from the gene of interest by at least about 20%, 30%, 40%, 50%, 60%, 70%, 80%, 85%, 90%, 95% and 100%, or at least 20-30%, 20-40%, 20-50%. 20-60%, 20-70%, 20-80%, 20-90%, 20-95%, 20-100%, 30-40%, 35-40%, 30-50%, 30-60%, 30-70%, 30-80%, 30-90%, 30-95%, 30-100%, 40-50%, 40-60%, 40-70%, 40-80%, 40-90%, 40-95%, 40-100%, 50-60%, 50-70%, 50-80%, 50-90%, 50-95%, 50-100%, 60-70%, 60-80%, 60-90%, 60-95%, 60-100%, 70-80%, 70-90%, 70-95%, 70-100%, 80-90%, 80-95%, 80-100%, 90-95%, 90-100% or 95-100%. As a non-limiting example, the expression of mRNA expression may be reduced 50-90%.

[0278] In certain embodiments, the encoded siRNA duplexes may be used to reduce the expression of protein encoded by the gene of interest and/or transcribed mRNA in at least one region of the CNS. The expression of protein and/or mRNA is reduced by at least about 20%, 30%, 40%, 50%, 60%, 70%, 80%, 85%. 90%, 95% and 100%, or at least 20-30%, 20-40%, 20-50%, 20-60%, 20-70%, 20-80%, 20-90%, 20-95%, 20-100%, 30-40%, 35-40%, 30-50%, 30-60%, 30-70%, 30-80%, 30-90%, 30-95%, 30-100%, 40-50%, 40-60%, 40-70%, 40-80%, 40-90%, 40-95%, 40-100%, 50-60%, 50-70%, 50-80%, 50-90%, 50-95%, 50-100%, 60-70%, 60-80%, 60-90%, 60-95%, 60-100%, 70-80%, 70-90%, 70-95%, 70-100%, 80-90%, 80-95%, 80-100%, 90-95%. 90-100% or 95-100% in at least one region of the CNS. As a non-limiting example, the region is the neurons (e.g., cortical neurons).

[0279] In certain embodiments, the formulated AAV particles comprising such encoded siRNA molecules may be introduced directly into the central nervous system of the subject, for example, by infusion into the putamen,

[0280] In certain embodiments, the formulated AAV particles comprising such encoded siRNA molecules may be introduced directly into the central nervous system of the subject, for example, by infusion into the thalamus of a subject.

[0281] In certain embodiments, the formulated AAV particles comprising such encoded siRNA molecules may be introduced directly into the 1 nervous system of the subject, for example, by infusion into the white matter of a subject.

[0282] In certain embodiments, the formulated AAV particles comprising such encoded siRNA molecules may be introduced to the central nervous system of the subject, for example, by intravenous administration to a subject.

[0283] In certain embodiments, the pharmaceutical composition of the present disclosure is used as a solo therapy. In certain embodiments, the pharmaceutical composition of the present disclosure is used in combination therapy. The combination therapy may be in combination with one or more neuroprotective agents such as small molecule compounds, growth factors and hormones which have been tested for their neuroprotective effect on motor neuron degeneration.

siRNA Molecules

[0284] The payloads of the formulated AAV particles of the present disclosure may encode one or more agents which are subject to RNA interference (RNAi) induced inhibition of gene expression. Provided herein are encoded siRNA duplexes or encoded dsRNA that target a gene of interest (referred to herein collectively as “siRNA molecules”). Such siRNA molecules, e.g., encoded siRNA duplexes, encoded dsRNA or encoded siRNA or dsRNA precursors can reduce or silence gene expression in cells, for example, astrocytes or microglia, cortical, hippocampal, entorhinal, thalamic, sensory or motor neurons.

[0285] RNAi (also known as post-transcriptional gene silencing (PTGS), quelling, or co-suppression) is a post-transcriptional gene silencing process in which RNA molecules, in a sequence specific manner, inhibit gene expression, typically by causing the destruction of specific mRNA molecules. The active components of RNAi are short/small double stranded RNAs (dsRNAs), called small interfering RNAs (siRNAs), that typically contain 15-30 nucleotides (e.g., 19 to 25, 19 to 24 or 19-21 nucleotides) and 2-nucleotide 3′ overhangs and. that match the nucleic acid sequence of the target gene. These short RNA species may be naturally produced in vivo by Dicer-mediated cleavage of larger dsRNAs and they are functional in mammalian cells.

[0286] Naturally expressed small. RNA molecules, known as microRNAs (miRNAs), elicit gene silencing by regulating the expression of mRNAs. The miRNAs containing RNA Induced Silencing Complex (RISC) targets mRNAs presenting a perfect sequence complementarity with nucleotides 2-7 in the 5′ region of the miRNA which is called the seed region, and other base pairs with its 3′ region, miRNA mediated down regulation of gene expression may be caused by cleavage of the target mRNAs, translational inhibition of the target mRNAs, or mRNA decay. miRNA targeting sequences are usually located in the 3′ UTR of the target mRNAs. A single miRNA may target more than 100 transcripts from various genes, and one mRNA may be targeted by different miRNAs.

[0287] siRNA duplexes or dsRNA targeting a specific mRNA may be designed as a payload of an AAV particle and introduced into cells for activating RNAi processes. Elbashir et al, demonstrated that 21-nucleotide siRNA duplexes (termed small interfering RNAs) were capable of effecting potent and specific gene knockdown without inducing immune response in mammalian cells (Elbashir S M et al., Nature, 2001, 411, 494-498). Since this initial report, post-transcriptional gene silencing by siRNAs quickly emerged as a powerful. tool for genetic analysis in mammalian cells and has the potential to produce novel therapeutics.

[0288] The siRNA duplex comprised of a sense strand homologous to the target mRNA and an antisense strand that is complementary to the target mRNA offers much more advantage in terms of efficiency for target RNA destruction compared to the use of the single strand (ss)-siRNAs (e.g. antisense strand RNA or antisense oligonucleotides). In many cases it requires higher concentration of the ss-siRNA to achieve the effective gene silencing potency of the corresponding duplex.

[0289] Any of the foregoing molecules may be encoded by an AAV particle or vector genome.

Design and Sequences of siRNA Duplexes Targeting a Gene of Interest

[0290] Some guidelines for designing siRNAs, e.g., herein encoded as a payload in a vector genome, have been proposed in the art. These guidelines generally recommend generating a 19-nucleotide duplexed region, symmetric 2-3 nucleotide 3′overhangs, 5-phosphate and 3-hydroxyl groups targeting a region in the gene to be silenced. Other rules that may govern siRNA sequence preference comprise, but are not limited to, (i) A/U at the 5′ end of the antisense strand; (ii) G/C at the 5′ end of the sense strand; (iii) at least five A/U residues in the 5′ terminal one-third of the antisense strand; and (iv) the absence of any GC stretch of more than 9 nucleotides in length. In accordance with such consideration, together with the specific sequence of a target gene, highly effective siRNA molecules essential for suppressing mammalian target gene expression may be readily designed.

[0291] In certain embodiments, an siRNA molecule of the present disclosure comprises a sense strand and a complementary antisense strand in which both strands are hybridized together to form a duplex structure. The antisense strand has sufficient complementarity to the mRNA sequence to direct target-specific RNAi, i.e., the siRNA. molecule has a sequence sufficient to trigger the destruction of the target mRNA by the RNAi machinery or process.

[0292] In certain embodiments, the antisense strand and target mRNA sequences have 100% complementarity. The antisense strand may be complementary to any part of the target mRNA sequence.

[0293] In certain embodiments, the antisense strand and target mRNA sequences comprise at least one mismatch. As a non-limiting example, the antisense strand and the target mRNA sequence have at least 30%, 40%, 50%, 60%, 70%, 80%, 81%, 82%, 83%, 84%, 85%, 86%, 87%, 88%, 89%, 90%, 91%, 92%, 93%, 94%, 95%, 96%, 97%, 98% or 99% or at least 20-30%, 20-40%, 20-50%, 20-60%, 20-70%, 20-80%, 20-90%, 20-95%, 20-99%, 30-40%, 30-50%, 30-60%, 30-70%, 30-80%, 30-90%, 30-95%, 30-99%, 40-50%, 40-60%, 40-70%, 40-80%, 40-90%, 40-95%, 40-99%, 50-60%, 50-70%, 50-80%, 50-90%, 50-95%, 50-99%, 60-70%, 60-80%, 60-90%, 60-95%, 60-99%, 70-80%, 70-90%, 70-95%, 70-99%, 80-90%, 80-95%, 80-99%, 90-95%, 90-99% or 95-99% complementary.

[0294] According to the present disclosure, encoded the siRNA molecule has a length from about 10-50 or more nucleotides, i.e., each strand comprising 10-50 nucleotides (or nucleotide analogs). In certain embodiments, the siRNA molecule has a length from about 15-30, e.g., 15, 16, 17, 18, 19, 20, 21, 22, 23, 24, 25, 26, 27, 28, 29, or 30 nucleotides in each strand, wherein one of the strands is sufficiently complementary to a target region. In certain embodiments, the encoded siRNA molecule has a length from about 19 to 25. 19 to 24 or 19 to 21 nucleotides.

[0295] In certain embodiments, the encoded siRNA molecules of the present disclosure may comprise a region of or encoding the nucleotide sequence of a gene of interest (e.g., sense or passenger sequence). As a non-limiting example, the sense sequence used in the siRNA molecule of the present disclosure has an identity which is at least 30%, 40%, 50%, 60%, 70%, 80%, 81%, 82%, 83%, 84%, 85%, 86%, 87%, 88%, 89%, 90%, 91%, 92%, 93%, 94%, 95%, 96%, 97%, 98% or 99% or at least 20-30%. 20-40%, 20-50%, 20-60%, 20-70%, 20-80%, 20-90%, 20-95%, 20-99%, 30-40%, 30-50%, 30-60%, 30-70%, 30-80%, 30-90%, 30-95%, 30-99%, 40-50%, 40-60%, 40-70%, 40-80%, 40-90%, 40-95%, 40-99%, 50-60%, 50-70%, 50-80%, 50-90%, 50-95%, 50-99%, 60-70%, 60-80%, 60-90%, 60-95%, 60-99%, 70-80%, 70-90%, 70-95%, 70-99%, 80-90%, 80-95%, 80-99%, 90-95%, 90-99% or 95-99% to a portion of the nucleotide sequence of the gene of interest or encoding the gene of interest. As another non-limiting example, the sense sequence used in the siRNA molecule of the present disclosure comprises at least 3, 4, 5, 6, 7, 8, 9, 10, 11, 12, 13, 14, 15, 16, 17, 18, 19, 20, 21 or more than 21 consecutive nucleotides of the nucleotide sequence of the gene of interest or encoding the gene of interest.

[0296] In certain embodiments, the encoded siRNA molecules of the present disclosure may comprise a region of a nucleotide sequence of the gene of interest or encoding the gene of interest (e.g., antisense or guide sequence) such as, but not limited to, at least 3, 4, 5, 6, 7, 8, 9, 10, 11, 12, 13, 14, 15, 16, 17, 18, 19, 20, 21 or more than 21 nucleotides which are the reverse complement the nucleotide sequence of the gene of interest or fragment or variant thereof. As a non-limiting example, the antisense sequence used in the encoded siRNA molecule of the present disclosure has a reverse complement which is at least 30%, 40%, 50%, 60%, 70%, 80%. 81%, 82%, 83%. 84%, 85%, 86%. 87%, 88%, 89%. 90%, 91%, 92%. 93%, 94%, 95%, 96%, 97%, 98% or 99% or at least 20-30%. 20-40%, 20-50%, 20-60%, 20-70%, 20-80%, 20-90%, 20-95%, 20-99%, 30-40%, 30-50%, 30-60%, 30-70%, 30-80%, 30-90%, 30-95%, 30-99%, 40-50%, 40-60%, 40-70%, 40-80%, 40-90%, 40-95%, 40-99%, 50-60%, 50-70%, 50-80%, 50-90%, 50-95%, 50-99%, 60-70%, 60-80%, 60-90%, 60-95%, 60-99%, 70-80%, 70-90%, 70-95%, 70-99%, 80-90%, 80-95%, 80-99%, 90-95%, 90-99% or 95-99% to a portion of a nucleotide sequence of the gene of interest or encoding the gene of interest. As another non-limiting example, the antisense sequence used in the siRNA molecule of the present disclosure comprises at least 3, 4, 5, 6, 7, 8, 9, 10, 11, 12, 13, 14, 15, 16, 17, 18, 19, 20, 21 or more than 21 consecutive nucleotides which are the reverse complement of a nucleotide sequence of the gene of interest or encoding the gene of interest.

[0297] In certain embodiments, the encoded siRNA molecules of the present disclosure may comprise an antisense sequence and a sense sequence, or a fragment or variant thereof. As a non-limiting example, the antisense sequence and the sense sequence have at least 30%, 40%, 50%, 60%, 70%, 80%, 81%, 82%, 83%, 84%, 85%, 86%, 87%, 88%, 89%, 90%, 91%, 92%, 93%, 94%, 95%, 96%. 97%, 98% or 99% or at least 20-30%, 20-40%, 20-50%, 20-60%, 20-70%, 20-80%, 20-90%, 20-95%, 20-99%, 30-40%, 30-50%, 30-60%, 30-70%, 30-80%, 30-90%, 30-95%, 30-99%, 40-50%, 40-60%, 40-70%, 40-80%, 40-90%, 40-95%, 40-99%, 50-60%, 50-70%, 50-80%, 50-90%, 50-95%, 50-99%, 60-70%, 60-80%, 60-90%, 60-95%, 60-99%, 70-80%, 70-90%, 70-95%, 70-99%, 80-90%, 80-95%, 80-99%, 90-95%, 90-99% or 95-99% complementary.

[0298] In one aspect, the sense and antisense strands of an encoded siRNA duplex are typically linked by a short spacer sequence leading to the expression of a stein-loop structure termed short hairpin RNA (shRNA). The hairpin is recognized and cleaved by Dicer, thus generating mature siRNA molecules.

[0299] In certain embodiments, the encoded siRNA duplexes of the present disclosure suppress (or degrade) target mRNA. Accordingly, the encoded siRNA duplexes can be used to substantially inhibit gene expression in a cell, for example a neuron or astrocyte. In some aspects, the inhibition of gene expression refers to an inhibition by at least about 20%, such as by at least about 30%, 40%, 50%, 60%, 70%. 80%, 85%, 90%, 95% and 100%, or at least 20-30%, 20-40%, 20-50%, 20-60%, 20-70%, 20-80%, 20-90%, 20-95%, 20-100%, 30-40%, 30-50%, 30-60%, 30-70%, 30-80%, 30-90%, 30-95%, 30-100%, 40-50%, 40-60%, 40-70%, 40-80%, 40-90%, 40-95%, 40-100%, 50-60%, 50-70%, 50-80%, 50-90%, 50-95%, 50-100%, 60-70%, 60-80%, 60-90%, 60-95%, 60-100%, 70-80%, 70-90%, 70-95%, 70-100%, 80-90%, 80-95%, 80-100%, 90-95%, 90-100% or 95-100%. Accordingly, the protein product of the targeted gene may be inhibited by at least about 20%, such as by at least about 30%, 40%, 50%, 60%, 70%, 80%, 85%, 90%, 95% and 100%, or at least 20-30%, 20-40%, 20-50%, 20-60%, 20-70©′0 20-80©′0 20-90%, 20-95%, 20-100%, 30-40%, 30-50%, 30-60%, 30-70%, 30-80%, 30-90%, 30-95%, 30-100%, 40-50%, 40-60%, 40-70%, 40-80%, 40-90%, 40-95%, 40-100%, 50-60%, 50-70%, 50-80%, 50-90%, 50-95%, 50-100%, 60-70%, 60-80%, 60-90%, 60-95%, 60-100%, 70-80%, 70-90%, 70-95%, 70-100%, 80-90%, 80-95%, 80-100%, 90-95%, 90-100% or 95-100%.

[0300] According to the present disclosure, the siRNA molecules (as canonical structures without being encoded in an AAV vector genome) are designed and tested for their ability in reducing target mRNA levels in cultured cells.

[0301] In certain embodiments, the encoded siRNA molecules comprise a miRNA seed match for the guide strand. In another embodiment, the siRNA molecules comprise a miRNA seed match for the passenger strand. In yet another embodiment, the encoded siRNA duplexes or encoded dsRNA targeting the gene of interest do not comprise a seed match for the guide or passenger strand.

[0302] In certain embodiments, the encoded siRNA duplexes or encoded dsRNA targeting the gene of interest may have almost no significant full-length off targets for the guide strand. In another embodiment, the encoded siRNA duplexes targeting a gene of interest may have almost no significant full-length off targets for the passenger strand. The encoded siRNA duplexes targeting the gene of interest may have less than 1%, 2%, 3%, 4%, 5%, 6%, 7%, 8%, 9%, 10%, 11%, 12%, 13%, 14%, 15%, 20%, 25%, 30%, 35%, 40%, 45%, 50%, 1-5%, 2-6%, 3-7%, 4-8%, 5-9%, 5-10%, 6-10%, 5-15%, 5-20%, 5-25% 5-30%, 10-20%, 10-30%, 10-40%, 10-50%, 15-30%, 15-40%, 15-45%, 20-40%, 20-50%, 25-50%, 30-40%, 30-50%, 35-50%, 40-50%, 45-50% full-length off targets for the passenger strand. In yet another embodiment, the encoded siRNA duplexes targeting the gene of interest may have almost no significant full-length off targets for the guide strand or the passenger strand. The encoded siRNA duplexes targeting the gene of interest may have less than 1%, 2%, 3%, 4%, 5%, 6%, 7%, 8%, 9%, 10%,11%, 12%, 13%, 14%, 15%, 20%, 25%, 30%, 35%, 40%, 45%, 50%, 1-5%, 7-6%, 3-7%, 4-8%, 5-9%, 5-10%, 6-10%, 5-15%, 5-20%, 5-25% 5-30%, 10-20%, 10-30%, 10-40%, 10-50%, 15-30⁰x©, 15-40⁰x©, 15-45%, 20-40%, 20-50%, 25-50%, 30-40%, 30-50%, 35-50%, 40-50%. 45-50% full-length off targets for the guide or passenger strand.

[0303] In certain embodiments, the encoded siRNA duplexes targeting the gene of interest may have high activity in vitro. In another embodiment, the siRNA molecules may have low activity in vitro. In yet another embodiment, the siRNA duplexes or dsRNA targeting the gene of interest may have high guide strand activity and low passenger strand activity in vitro.

[0304] In certain embodiments, the siRNA molecules have a high guide strand activity and low passenger strand activity in vitro. The target knock-down (KD) by the guide strand may be at least 60%, 65%, 70%, 75%, 80%, 85%, 90%, 95%, 99%, 99.5% or 100%. The target knock-down by the guide strand may be 60-65%, 60-70%, 60-75%, 60-80%, 60-85%, 60-90%, 60-95%, 60-99%, 60-99.5%, 60-100%, 65-70%, 65-75%, 65-80%, 65-85%, 65-90%, 65-95%, 65-99%, 65-99.5%, 65-100%, 70-75%, 70-80%, 70-85%, 70-90%, 70-95%, 70-99%, 70-99.5%, 70-100%, 75-80%, 75-85%, 75-90%, 75-95%, 75-99%, 75-99.5%, 75-100%, 80-85%, 80-90%, 80-95%, 80-99%, 80-99.5%, 80-100%, 85-90%, 85-95%, 85-99%, 85-99.5%, 85-100%, 90-95%, 90-99%, 90-99.5%, 90-100%, 95-99%, 95-99.5%, 95-100%, 99-99.5%, 99-100% or 99.5-100%. As a non-limiting example, the target knock-down (KD) by the guide strand is greater than 70%.

[0305] In certain embodiments, the IC₅₀ of the passenger strand for the nearest off target is greater than 100 multiplied by the IC₅₀ of the guide strand for the target. As a non-limiting example, if the IC₅₀ of the passenger strand for the nearest off target is greater than 100 multiplied by the IC₅₀ of the guide strand for the target then the siRNA molecules is said to have high guide strand activity and a low passenger strand activity in vitro.

[0306] In certain embodiments, the 5′ processing of the guide strand has a correct start (n) at the 5′ end at least 75%, 80%, 85%. 90%, 95%, 99% or 100% of the time in vitro or in vivo. As a non-limiting example, the 5′ processing of the guide strand is precise and has a correct start (n) at the 5′ end at least 99% of the time in vitro. As a non-limiting example, the 5′ processing of the guide strand is precise and has a correct start (n) at the 5′ end at least 99% of the time in vivo.

[0307] In certain embodiments, the guide to passenger (G:P) (also referred to as the antisense to sense) strand ratio expressed is 1:10, 1:9, 1:8, 1:7, 1:6, 1:5, 1:4, 1:3, 1:2, 1;1, 2:10, 2:9, 2:8, 2:7, 2:6, 2:5, 2:4, 2:3, 2:2, 3:10, 3:9, 3:8, 3:7, 3:6, 3:4, 3:3, 3:2, 3:1, 4:10, 4:9, 4:8, 4:7, 4:6, 4:5, 4:4, 4:3, 4:2, 4:1, 5:10, 5:9, 5:8, 5:7, 5:6, 5:5, 5:4, 5:3, 5:2, 5:1, 6:10, 6:9, 6:8, 6:7, 6:6, 6:5, 6:4, 6:3, 6:2, 6:1, 7:10, 7:9, 7:8, 7:7, 7:6, 7:5, 7:4, 7:3, 7:2, 7:1, 8:10, 8:9, 8:8, 8:7, 8:6, 8:5, 8:4, 8:3, 8:2, 8:1, 9:10, 9:9, 9:8, 9:7, 9:6, 9:5, 9:4, 9:3, 9:2, 9:1, 10:10, 10:9, 10:8, 10:7, 10:6, 10:5, 10:4, 10:3, 10:2, 10:1, 1:99, 5:95, 10:90, 15:85, 20:80, 75:75, 30:70, 35:65, 40:60, 45:55, 50:50, 55:45, 60:40, 65:35, 70:30, 75:75, 80:20, 85:15, 90:10, 95:5, or 99:1 in vitro or in vivo. The guide to passenger ratio refers to the ratio of the guide strands to the passenger strands after the excision of the guide strand. For example, an 80:20 guide to passenger ratio would have 8 guide strands to every 2 passenger strands clipped out of the precursor. As a non-limiting example, the guide-to-passenger strand ratio is 80:20 in vitro. As a non-limiting example, the guide-to-passenger strand ratio is 80:20 in vivo. As a non-limiting example, the guide-to-passenger strand ratio is 8:2 r, vitro, As a non-limiting example, the guide-to-passenger strand ratio is 8:2 in vivo. As a non-limiting example, the guide-to-passenger strand ratio is 9:1 in vitro. As a non-limiting example, the guide-to-passenger strand ratio is 9:1 in vivo.

[0308] In certain embodiments, the passenger to guide (P:G) (also referred to as the sense to antisense j strand ratio expressed is 1:10, 1:9, 1:8, 1:7, 1:6, 1:5, 1:4, 1:3, 1:2, 1;1, 2:10, 2:9, 2:8, 2:7, 2:6, 2:5, 2:4, 2:3, 2:2, 2:1, 3:10, 3:9, 3:8, 3:7, 3:6, 3:5, 3:4, 3:3, 3:2, 3:1, 4:10, 4:9, 4:8, 4:7, 4:6, 4:5, 4:4, 4:3, 4:2, 4:1, 5:10, 5:9, 5:8, 5:7, 5:6, 5:5, 5:4, 5:3, 5:2, 5:1, 6:10, 6:9, 6:8, 6:7, 6:6, 6:5, 6:4, 6:3, 6:2, 6:1, 7:10, 7:9, 7:8, 7:7, 7:6, 7:5, 7:4, 73, 7:2, 7:1, 8:10, 8:9, 8:8, 8:7, 8:6, 8:5, 8:4, 8:3, 8:2, 8:1, 9:10, 9:9, 9:8, 9:7, 9:6, 9:5, 9:4, 9:3, 9:2, 9:1, 10:10, 10:9, 10:8, 10:7, 10:6, 10:5, 10:4, 10:3, 10:2, 10:1, 1:99, 5:95, 10:90, 15:85, 20:80, 25:75, 30:70, 35:65, 40:60, 45:55, 50:50, 55:45, 60:40, 65:35, 70:30, 75:25, 80:20, 85:15, 90:10, 95:5, or 99:1 in vitro or in vivo. The passenger to guide ratio refers to the ratio of the passenger strands to the guide strands after the excision of the guide strand. For example, an 80:20 passenger to guide ratio would have 8 passenger strands to every 2 guide strands clipped out of the precursor. As a non-limiting example, the passenger-to-guide strand ratio is 80:20 in vivo. As a non-limiting example, the passenger-to-guide strand ratio is 80:20 in vivo. As a non-limiting example, the passenger-to-guide strand ratio is 8:2 in vitro. As a non-limiting example, the passenger-to-guide strand ratio is 8:2 in vivo. As a non-limiting example, the passenger-to-guide strand ratio is 9:1 in vitro. As a non-limiting example, the passenger-to-guide strand ratio is 9:1 in vivo.

[0309] In certain embodiments, the integrity of the vector genome encoding the dsRNA is at least 60%, 65%, 70%, 75%, 80%, 85%, 90%, 95%, 99% or more than 99% of the full length of the construct. As a non-limiting example, the integrity of the vector genome is 80% of the full length of the construct.

[0310] In certain embodiments, the passenger and/or guide strand is designed based on the method and rules outlined in European Patent Publication No. EP1752536. the contents of which are herein incorporated by reference in their entirety. As a non-limiting example, the 3′-terminal base of the sequence is adenine, thymine or uracil. As a non-limiting example, the 5′-terminal base of the sequence is guanine or cytosine. As a non-limiting, example, the 3′-terminal sequence comprises seven bases rich in one or more bases of adenine, thymine and uracil. As a non-limiting example, the base number is at such a level as causing RNA interference without expressing cytotoxicity.

### Molecular Scaffold

[0311] In certain embodiments, the siRNA molecules may be encoded in a modulatory polynucleotide which also comprises a molecular scaffold. As used herein a “molecular scaffold” is a framework or starting molecule that forms the sequence or structural basis against which to design or make a subsequent molecule.

[0312] In certain embodiments, the modulatory polynucleotide which comprises the payload (e.g., siRNA, miRNA or other RNAi agent described herein) comprises molecular scaffold which comprises a leading 5′ flanking; sequence which may be of any length and may be derived in whole or in part from wild type microRNA sequence or be completely artificial. A 3′ flanking sequence may mirror the 5′ flanking sequence in size and origin. In certain embodiments, one or both of the 5′ and 3′ flanking sequences are absent.

[0313] In certain embodiments the 5′ and 3′ flanking sequences are the same length.

[0314] In certain embodiments the 5′ flanking sequence is from 1-10 nucleotides in length, from 5-15 nucleotides in length, from 10-30 nucleotides in length, from 20-50 nucleotides in length, greater than 40 nucleotides in length, greater than 50 nucleotides in length, greater than 100 nucleotides in length or greater than 200 nucleotides in length.

[0315] In certain embodiments, the 5′ flanking sequence may be 1, 2. 3, 4, 5, 6, 7, 8, 9, 10, 11, 12, 13, 14, 15, 16, 17, 18, 19, 20, 21, 22, 23, 24, 25, 26, 27, 28, 29, 30, 31, 32, 33, 34, 35, 36, 37, 38, 39, 40, 41, 42, 43, 44, 45, 46, 47, 48, 49, 50, 51, 52, 53, 54, 55, 56, 57, 58, 59, 60, 61, 62, 63, 64, 65, 66, 67, 68, 69, 70, 71, 72, 73, 74, 75, 76, 77, 78, 79, SO, 81, 82, 83, 84, 85, 86, 87, 88, 89, 90, 91, 92, 93, 94, 95, 96, 97, 98, 99, 100, 101, 102, 103, 104, 105, 106, 107, 108, 109, 110, 111, 112, 113, 114, 115, 116, 117, 118, 119, 120, 121, 122, 123, 124, 125, 126, 127, 128, 129, 130, 131, 132, 133, 134, 135, 136, 137, 138, 139, 140, 141, 142., 143, 144, 145, 146, 147, 148, 149, 150, 151, 152, 153, 154, 155, 156, 157, 158, 159, 160, 161, 162, 163, 164, 165, 166, 167, 168, 169, 170, 171, 172, 173, 174, 175, 176, 177, 178, 179, 180, 181, 182, 183, 184, 185, 186, 187, 188, 189, 190, 191, 192, 193, 194, 195, 196, 197, 198, 199, 200, 201, 202, 203, 204, 205, 206, 207, 208. 209, 210, 211, 212, 213, 214, 215, 216, 217. 218, 219, 220, 221, 222, 223, 224, 225, 226, 227, 228, 229, 230, 231, 232, 233, 234, 235, 236, 237, 238, 239, 240, 241, 242, 243, 244, 245, 246, 247, 248, 249, 250, 251, 252, 253, 254, 255, 256, 257, 258, 259, 260, 261, 262, 263, 264, 265, 266, 267, 268, 269, 270, 271, 272, 273, 274, 275, 276, 277, 278, 279, 280, 281, 282, 283, 284, 285, 286, 287, 288, 289, 290, 291, 292, 293, 294, 295, 296, 297, 298, 299, 300, 301, 302, 303, 304, 305, 306, 307, 308, 309, 310, 311, 312, 313, 314, 315, 316, 317, 318, 319, 320, 321, 322, 323, 324, 325, 326, 327, 328, 329, 330, 331, 332, 333, 334, 335, 336, 337, 338, 339, 340, 341, 342, 343, 344, 345, 346, 347, 348, 349, 350, 351, 352, 353, 354, 355, 356, 357, 358, 359, 360, 361, 362, 363, 364, 365, 366, 367, 368, 369, 370, 371, 372, 373, 374, 375, 376, 377, 378, 379, 380. 381, 382, 383, 384, 385, 386, 387. 388, 389, 390, 391, 392, 393, 394, 395, 396, 397, 398, 399, 400, 401, 402, 403, 404, 405, 406, 407, 408, 409, 410, 411, 412, 413, 414, 415, 416, 417, 418, 419, 420, 421, 422, 423, 424, 425, 426, 427, 428, 429, 430, 431, 432, 433, 434, 435, 436, 437, 438, 439, 440, 441, 44.2, 443, 444, 445, 446, 447, 448, 449, 450, 451, 452, 453, 454, 455, 456, 457, 458, 459, 460. 461., 462, 463, 464, 465, 466, 467, 468, 469, 470, 471, 472, 473, 474, 475, 476, 477, 478, 479, 480, 481, 482, 483, 484, 485, 486, 487, 488, 489, 490, 491, 492, 493, 494, 495, 496, 497, 498, 499, or 500 nucleotides in length.

[0316] In certain embodiments the 3′ flanking sequence is from 1-10 nucleotides in length, from 5-15 nucleotides in length, from 10-30 nucleotides in length, from 20-50 nucleotides in length, greater than 40 nucleotides in length, greater than 50 nucleotides in length., greater than 100 nucleotides in length or greater than 200 nucleotides in length.

[0317] In certain embodiments, the 3′ flanking sequence may he 1, 2, 3, 4, 5, 8, 9, 10, 11, 12, 13, 14, 15, 16, 17, 18, 19, 20, 21, 22, 23, 24, 25, 26, 27, 28, 29, 30, 31, 32, 33, 34, 35, 36, 37, 38, 39, 40, 41, 42, 43, 44, 45, 46, 47, 48, 49, 50, 51, 52, 53, 54, 55, 56, 57, 58, 59, 60, 61, 62, 63, 64, 65, 66, 67, 68, 69, 70, 71, 72, 73, 74, 75, 76, 77, 78, 79, 80, 81, 82, 83, 84, 85, 86, 87, 88, 89, 90, 91, 92, 93, 94, 95, 96, 97, 98, 99, 100, 101, 102, 103, 104, 105, 106, 107, 108, 109, 110, 111, 112, 113, 114, 115, 116, 117, 118 119, 120, 121, 122, 123, 124, 125, 126, 1.27, 128, 129, 130, 131, 132, 133, 134, 135, 136, 137, 138, 139, 140, 141, 142, 143, 144, 145, 146, 147, 148, 149, 150, 151, 152, 153, 154, 155, 156, 157, 158, 159, 160, 161, 162, 163, 164, 165, 166, 167, 168, 169, 170, 171, 172, 173, 174, 175, 176, 177, 178, 179, 180, 181, 182, 183, 184, 185, 186, 187, 188, 189, 190, 191, 192, 193, 194, 195, 196, 197, 198, 199, 200, 201, 202. 203, 204, 205, 206, 207, 208, 209. 210, 211, 212, 213, 214, 215, 216, 217, 218, 219, 220, 221, 222, 223, 224, 225, 226, 227, 228, 229, 230, 231, 232, 233, 234, 235, 236, 237, 238, 239, 240, 241, 242, 243, 244, 245, 246, 247, 248, 249, 251, 252, 253, 254, 255, 256, 257, 258, 259, 260, 261, 262, 263, 264, 265, 266, 267, 268, 269, 270, 271, 272, 273, 274, 275, 276, 277, 278, 279, 280, 281, 282. 283, 284, 285, 286, 2.87, 288, 289, 290, 291, 292, 293, 294, 295, 296, 297, 298, 299, 300, 301, 302, 303, 304, 305, 306, 307, 308, 309, 310, 311, 312, 313, 314, 315, 316, 317, 318, 319, 320, 321, 322, 323, 324, 325, 326, 327, 328, 329, 330, 331, 332, 333, 334, 335, 336, 337, 338, 339, 340, 341, 342, 343, 344, 345, 346, 347, 348, 349, 350, 351, 352, 353, 354, 355, 356, 357 358, 359, 360, 361, 362, 363, 364, 365, 366, 367, 368, 369, 370, 371, 372, 373, 374, 375, 376, 377, 378, 379, 380, 381, 382, 383, 384, 385, 386, 387, 388, 389, 390, 391, 392, 393, 394, 395, 396, 397, 398, 399, 400, 401, 402, 403, 404, 405, 406, 407, 408, 409, 410, 411, 412, 413, 414, 415, 416, 417, 418, 419, 420, 421, 422, 423, 424, 425, 426, 427, 428, 429, 430, 431, 432, 433, 434, 435, 436, 437, 438, 439, 440, 441, 442, 443, 444, 445, 446, 447, 448, 449, 450, 451, 452, 453, 454, 455, 456, 457, 458, 459, 460, 461, 462, 463, 464, 465, 466, 467, 468, 469, 470, 471, 472, 473, 474, 475, 476, 477, 478, 479, 480, 481, 482, 483, 484, 485, 486, 487, 488, 489, 490, 491, 492, 493, 494, 495, 496, 497, 498, 499, or 500 nucleotides in length.

[0318] In certain embodiments the 5′ and 3′ flanking sequences are the same sequence. In certain embodiments they differ by 2%, 3%, 4%, 5%, 10%, 20% or more than 30% when aligned to each other.

[0319] The 3′ flanking sequence may optionally contain one or more CNNC motifs, where “N” represents any nucleotide.

[0320] Foaming the stein of a stem loop structure is a minimum of at least one payload sequence. In certain embodiments, the payload sequence comprises at least one nucleic acid sequence which is in part complementary or will hybridize to the target sequence. In certain embodiments, the payload is an siRNA molecule or fragment of an siRNA molecule.

[0321] In certain embodiments, the 5′ arm of the stein loop comprises a sense sequence.

[0322] In certain embodiments, the 3′ arm of the stem loop comprises an antisense sequence. The antisense sequence, in some instances, comprises a “G” nucleotide at the 5′ most end.

[0323] In certain embodiments, the sense sequence may reside on the 3′ arm while the antisense sequence resides on the 5′ arm of the stem of the stem loop structure.

[0324] The sense and antisense sequences may be completely complementary across a substantial portion of their length. In certain embodiments, the sense sequence and antisense sequence may be at least 70, 80, 90, 95 or 99% complementary across independently at least 50, 60, 70, 80, 85, 90, 95, or 99% of the length of the strands.

[0325] Neither the identity of the sense sequence nor the homology of th e antisense sequence need be 100% complementary to the target.

[0326] Separating the sense and antisense sequence of the stem loop structure is a loop (also known as a loop motif). The loop may be of any length, between 4-30 nucleotides, between 4-20 nucleotides, between 4-15 nucleotides, between 5-15 nucleotides, between 6-12 nucleotides, 6 nucleotides, 7, nucleotides, 8 nucleotides, 9 nucleotides, 10 nucleotides, 11 nucleotides, and/or 12 nucleotides.

[0327] In certain embodiments, the loop comprises at least one UGUG motif. In certain embodiments, the UGUG motif is located at the 5′ terminus of the loop.

[0328] Spacer regions may be present in the modulatory polynucleotide to separate one or more modules from one another. There may he one or more such spacer regions present.

[0329] In certain embodiments, a spacer region of between 8-20, i.e., 8, 9, 10, 11, 12, 13, 14, 15, 16, 17, 18, 19, or 20 nucleotides may be present between the sense sequence and a flanking sequence.

[0330] In certain embodiments, the spacer is 13 nucleotides and is located between the 5′ terminus of the sense sequence and a flanking sequence. In certain embodiments, a spacer is of sufficient length to form approximately one helical turn of the sequence.

[0331] In certain embodiments, a spacer region of between 8-20, i.e., 8, 9, 10, 11, 12, 13, 14, 15, 16, 17, 18, 19, or 20 nucleotides may be present between the antisense sequence and a flanking sequence.

[0332] In certain embodiments, the spacer sequence is between 10-13, i.e., 10, 11, 12 or 13 nucleotides and is located between the 3′ terminus of the antisense sequence and a flanking sequence. In certain embodiments, a spacer is of sufficient length to form approximately one helical turn of the sequence.

[0333] In certain embodiments, the modulatory polynucleotide comprises in the 5′ to 3′ direction, a 5′ flanking sequence, a. 5′ arm, a loop motif, a 3′ arm and a 3′ flanking sequence. As a non-limiting example, the 5′ arm may comprise a sense sequence and the 3′ aim comprises the antisense sequence. In another non-limiting example. the 5′ arm comprises the antisense sequence and the 3′ arm comprises the sense sequence.

[0334] In certain embodiments, the 5′ arm, payload (e.g., sense and/or antisense sequence), loop motif and/or 3′ arm sequence may be altered (e.g., substituting 1 or more nucleotides, adding nucleotides and/or deleting nucleotides). The alteration may cause a beneficial change in the function of the construct (e.g, increase knock-down of the target sequence, reduce degradation of the construct, reduce off target effect, increase efficiency of the payload, and reduce degradation of the payload).

[0335] In certain embodiments, the molecular scaffold of the modulatory polynucleotides is aligned in order to have the rate of excision of the guide strand be greater than the rate of excision of the passenger strand. The rate of excision of the guide or passenger strand may be, independently, 1%, 2%, 3%, 4%, 5%, 10%, 15%, 20%, 25%, 30%, 35%, 40%, 45%, 50%, 55%, 60%, 65%, 70%, 75%, 80%, 85%, 90%, 95%, 99% or more than 99%. As a non-limiting example, the rate of excision of the guide strand is at least 80%. As another non-limiting example, the rate of excision of the guide strand is at least 90%.

[0336] In certain embodiments, the rate of excision of the guide strand is greater than the rate of excision of the passenger strand. In one aspect, the rate of excision of the guide strand may be at least 1%, 2%, 3%, 4%, 5%, 10%, 15%, 20%, 25%, 30%, 35%, 40%, 45%, 50%, 55%, 60%, 65%, 70%, 75%, 80%, 85%, 90%, 95%, 99% or more than 99% greater than the passenger strand.

[0337] In certain embodiments, the efficiency of excision of the guide strand is at least 60%, 65%, 70%, 75%, 80%, 85%, 90%, 95%, 99% or more than 99%. As a non-limiting example, the efficiency of the excision of the guide strand is greater than 80%.

[0338] In certain embodiments, the efficiency of the excision of the guide strand is greater than the excision of the passenger strand from the molecular scaffold. The excision of the guide strand may be 2, 3, 4, 5, 6, 7, 8, 9, 10 or more than 10 times more efficient than the excision of the passenger strand from the molecular scaffold.

[0339] In certain embodiments, the molecular scaffold comprises a dual-function targeting modulatory polynucleotide. As used herein, a dual-function targeting modulatory polynucleotide is a polynucleotide where both the guide and passenger strands knock down the same target or the guide and passenger strands knock down different targets.

[0340] In certain embodiments, the molecular scaffold of the modulatory polynucleotides described herein comprise a 5′ flanking region, a loop region and a 3′ flanking region. Non-limiting examples of the sequences for the 5′ flanking region, loop region and the 3′ flanking region which may be used in the molecular scaffolds described herein are shown in Tables 2-4.

TABLE 2
5′ Flanking Regions for Molecular Scaffold

| | | SEQ |
|---|---|---|
| 5′ Flanking | | ID |
| Region Name | 5′ Flanking Region Sequence | NO |
| 5F1 | UUUAUGCCUCAUCCUCUGAGUGCUGAAGGC | 1725 |
| | UUGCUGUAGGCUGUAUGCUG | |
| 5F2 | GUGCUGGGCGGGGGGCGGCGGGCCCUCCCGC | 1726 |
| | AGAACACCAUGCGCUCUUCGGAA | |
| 5F3 | GAAGCAAAGAAGGGGCAGAGGGAGCCCGUG | 1727 |
| | AGCUGAGUGGGCCAGGGACUGGGAGAAGGA | |
| | GUGAGGAGGCAGGGCCGGCAUGCCUCUGCU | |
| | GCUGGCCAGA | |
| 5F4 | GUGCUGGGCGGGGGGCGGCGGGCCCUCCCGC | 1728 |
| | AGAACACCAUGCGCUCUUCGGGA | |
| 5F5 | GUGCUGGGCGGGGGGCGGCGGGCCCUCCCGC | 1729 |
| | AGAACACCAUGCGCUCCACGGAA | |
| 5F6 | GGGCCCUCCCGCAGAACACCAUGCGCUCCAC | 1730 |
| | GGAA | |
| 5F7 | CUCCCGCAGAACACCAUGCGCUCCACGGAA | 1731 |
| 5F8 | GUGCUGGGCGGGGGGCGGCGGGCCCUCCCGC | 1732 |
| | AGAACACCAUGCGCUCCACGGAAG | |
| 5F9 | GUGCUGGGCGGGGGGCGGCGGGCCCUCCCGC | 1733 |
| | AGAACACCAUGCGCUCCUCGGAA | |

TABLE 3
Loop Motif Regions for Molecular Scaffold

| Loop Motif | Loop Motif Region | SEQ ID |
|---|---|---|
| Region Name | Sequence | NO |
| L1 | UGUGACCUGG | 1734 |
| L2 | UGUGAUUUGG | 1735 |
| L3 | UAUAAUUUGG | 1736 |
| L4 | CCUGACCCAGU | 1737 |
| L5 | GUCUGCACCUGUCACUAG | 1738 |
| L6 | GUGACCCAAG | 1739 |
| L7 | GUGGCCACUGAGAAG | 1740 |
| L8 | GUGACCCAAU | 1741 |
| L9 | GUGACCCAAC | 1742 |
| L10 | GUGGCCACUGAGAAA | 1743 |

TABLE 4
3′ Flanking Regions for Molecular Scaffold

| | | SEQ |
|---|---|---|
| 3′ Flanking | | ID |
| Region Name | 3' Flanking Region Sequence | NO |
| 3F1 | AGUGUAUGAUGCCUGUUACUAGCAUUCACA | 1744 |
| | UGGAACAAAUUGCUGCCGUG | |
| 3F2 | CUGAGGAGCGCCUUGACAGCAGCCAUGGGA | 1745 |
| | GGGCCGCCCCCUACCUCAGUGA | |
| 3F3 | CUGUGGAGCGCCUUGACAGCAGCCAUGGGA | 1746 |
| | GGGCCGCCCCCUACCUCAGUGA | |
| 3F4 | UGGCCGUGUAGUGCUACCCAGCGCUGGCUG | 1747 |
| | CCUCCUCAGCAUUGCAAUUCCUCUCCCAUC | |
| | UGGGCACCAGUCAGCUACCCUGGUGGGAAU | |
| | CUGGGUAGCC | |
| 3F5 | GGCCGUGUAGUGCUACCCAGCGCUGGCUGC | 1748 |
| | CUCCUCAGCAUUGCAAUUCCUCUCCCAUCU | |
| | GGGCACCAGUCAGCUACCCUGGUGGGAAUC | |
| | UGGGUAGCC | |
| 3F6 | UCCUGAGGAGCGCCUUGACAGCAGCCAUGG | 1749 |
| | GAGGGCCGCCCCCUACCUCAGUGA | |
| 3F7 | CUGAGGAGCGCCUUGACAGCAGCCAUGGGA | 1750 |
| | GGGCC | |
| 3F8 | CUGCGGAGCGCCUUGACAGCAGCCAUGGGA | 1751 |
| | GGGCCGCCCCCUACCUCAGUGA | |

[0341] Any of the regions described in Tables 2-4 may be used in the molecular scaffolds described herein.

[0342] In certain embodiments, the molecular scaffold may comprise one or more linkers known in the art. The linkers may separate regions or one molecular scaffold from another. As a non-limiting example, the molecular scaffold may be polycistronic.

[0343] In certain embodiments, the modulatory polynucleotide is designed using at least one of the following properties: loop variant, seed mismatch/bulge/wobble variant, stem mismatch, loop variant and basal stem mismatch variant, seed mismatch and basal stem mismatch variant, stem mismatch and basal stem mismatch variant, seed wobble and basal stem wobble variant, or a stem sequence variant.

Introduction into Cells

[0344] The encoded siRNA molecules (e.g., siRNA duplexes) of the present disclosure may be introduced into cells by being encoded by the vector genome of an AAV particle. These AAV particles are engineered and optimized to facilitate the entry into cells that are not readily amendable to transfection/transduction. Also, some synthetic viral vectors possess an ability to integrate the shRNA into the cell genome, thereby leading to stable siRNA expression and long-term knockdown of a target gene. In this manner, viral vectors are engineered as vehicles for specific delivery while lacking the deleterious replication and/or integration features found in wild-type virus.

[0345] In certain embodiments, the encoded siRNA molecule is introduced into a cell by transfecting, infecting or transducing the cell with an AAV particle comprising nucleic acid sequences capable of producing the siRNA molecule when transcribed in the cell. In certain embodiments, the siRNA molecule is introduced into a cell by injecting into the cell or tissue an AAV particle comprising a nucleic acid sequence capable of producing the siRNA molecule when transcribed in the cell.

[0346] In certain embodiments, prior to transfection/transduction, an AAV particle comprising a nucleic acid sequence encoding the siRNA molecules of the present disclosure may be transfected into cells.

[0347] Other methods for introducing AAV particles comprising the nucleic acid sequence for the siRNA molecules described herein may comprise photochemical internalization as described in U. S. Patent publication No. 20120264807, the content of which is incorporated herein by reference in its entirety as related to photochemical internalizations, insofar as it does not conflict with the present disclosure.

[0348] In certain embodiments, the formulations described herein may contain at least one AAV particle comprising the nucleic acid sequence encoding the siRNA molecules described herein. In certain embodiments, the siRNA molecules may target the gene of interest at one target site. In another embodiment, the formulation comprises a plurality of AAV particles, each AAV particle comprising a nucleic acid sequence encoding a siRNA molecule targeting the gene of interest at a different target site. The gene of interest may be targeted at 2, 3, 4, 5 or more than 5 sites.

[0349] In certain embodiments, the AAV particles from any relevant species, such as, but not limited to, human, pig, dog, mouse, rat or monkey may be introduced into cells.

[0350] In certain embodiments, the formulated AAV particles may be introduced into cells or tissues which are relevant to the disease to be treated.

[0351] In certain embodiments, the formulated AAV particles may be introduced into cells which have a high level of endogenous expression of the target sequence.

[0352] In another embodiment, the formulated AAV particles may be introduced into cells which have a low level of endogenous expression of the target sequence.

[0353] In certain embodiments, the cells may be those which have a high efficiency of AAV transduction.

[0354] In certain embodiments, formulated AAV particles comprising a nucleic acid sequence encoding the siRNA molecules of the present disclosure may be used to deliver siRNA molecules to the central nervous system (e.g., U.S. Pat. No. 6,180,613, the content of which is incorporated herein by reference in its entirety as related to the deliver and therapeutic use of siRNA molecules and AAV particles, insofar as it does not conflict with the present disclosure).

[0355] In certain embodiments, the formulated AAV particles comprising a nucleic acid sequence encoding the siRNA molecules of the present disclosure may further comprise a modified capsid comprising peptides from non viral origin. In other aspects, the AAV particle may contain a CNS specific chimeric capsid to facilitate the delivery of encoded siRNA duplexes into the brain and the spinal cord. For example, an alignment of cap nucleotide sequences from AAV variants exhibiting CNS tropism may be constructed to identify variable region (VR) sequence and structure.

[0356] In certain embodiments, the formulated AAV particle comprising a nucleic acid sequence encoding the siRNA molecules of the present disclosure may encode siRNA molecules which are polycistronic molecules. The siRNA molecules may additionally comprise one or more linkers between regions of the siRNA molecules.

[0357] In certain embodiments, a formulated AAV particle may comprise at least one of the modulatory polynucleotides encoding at least one of the siRNA sequences or duplexes described herein,

[0358] In certain embodiments, an expression vector may comprise, from ITR to ITR recited 5′ to 3′, an ITR, a promoter, an intron, a modulatory polynucleotide, a polyA sequence and an ITR.

[0359] In certain embodiments, the encoded siRNA molecule may be located downstream of a promoter in an expression vector such as, but not limited to, CMV, U6, H1, CBA or a CBA promoter with a SV40 intron. Further, the encoded siRNA molecule may also be located upstream of the polyadenylation sequence in an expression vector. As a non-limiting example, the encoded siRNA molecule may he located within 1, 2, 3, 4, 5, 6, 7, 8, 9, 10, 11, 12, 13, 14, 15, 16. 17, 18, 19, 20, 21, 22, 23, 24, 25, 26, 27, 28, 29, 30 or more than 30 nucleotides downstream from the promoter and/or upstream of the polyadenylation sequence in an expression vector. As another non-limiting example, the encoded siRNA molecule may be located within 1-5, 1-10, 1-15, 1-20, 1-25, 1-30, 5-10, 5-15, 5-20, 5-25, 5-30, 10-15, 10-20, 10-25, 10-30, 15-20, 15-25, 15-30, 20-25, 20-30 or 25-30 nucleotides downstream from the promoter and/or upstream of the polyadenylation sequence in an expression vector. As a non-limiting example, the encoded siRNA molecule may be located within the first 1%, 2%, 3%, 4%, 5%, 6%, 7©0 8%, 9%, 10%, 15%, 20%, 25% or more than 25% of the nucleotides downstream from the promoter and/or upstream of the polyadenylation sequence in an expression vector, As another non-limiting, example, the encoded siRNA molecule may be located with the first 1-5%, 1-10%, 1-15%, 1-20%, 1-25%, 5-10%, 5-15%, 5-20%, 5-25%, 10-15%, 10-20%, 10-25%, 15-20%, 15-25%, or 20-25% downstream from the promoter and/or upstream of the polyadenylation sequence in an expression vector.

[0360] In certain embodiments, the encoded siRNA molecule may be located upstream of the polyadenylation sequence in an expression vector. Further, the encoded siRNA molecule may be located downstream of a promoter such as, but not limited to, CMV, U6, CBA or a CBA promoter with a SV40 intron in an expression vector. As a non-limiting example, the encoded siRNA molecule may be located within 1, 2, 3, 4, 5, 6, 7, 8, 9, 10, 11, 12, 13, 14, 15, 16, 17, 18, 19, 20, 21, 22, 23, 24, 25, 26, 27, 28, 29, 30 or more than 30 nucleotides downstream from the promoter and/or upstream of the polyadenylation sequence in an expression vector. As another non-limiting example, the encoded siRNA molecule may he located within 1-5, 1-10, 1-15, 1-20, 1-25, 1-30, 5-10, 5-15, 5-20, 5-25, 5-30. 10-15, 10-20, 10-25, 10-30, 15-20, 15-25, 15-30, 20-25, 20-30 or 25-30 nucleotides downstream from the promoter and/or upstream of the polyadenylation sequence in an expression vector. As a non-limiting example, the encoded siRNA molecule may he located within the first 1%, 2%, 3%, 4%, 5%, 6%, 7%, 8%, 9%, 10%, 15%, 20%, 25% or more than 25% of the nucleotides downstream from the promoter and/or upstream of the polyadenylation sequence in an expression vector. As another non-limiting example, the encoded siRNA molecule may be located with the first 1-5%, 1-10%, 1-15%, 1-20%, 1-25%, 5-10%, 5-15%, 5-20%, 5-25%, 10-15%, 10-20%, 10-25%, 15-20%, 15-25%, or 20-25% downstream from the promoter and/or upstream of the polyadenylation sequence in an expression vector.

[0361] In certain embodiments, the encoded siRNA molecule may be located in a scAAV.

[0362] In certain embodiments, the encoded siRNA molecule may be located in an ssAAV.

[0363] In certain embodiments, the encoded siRNA molecule may be located near the 5′ end of the flip ITR in an expression vector, In another embodiment, the encoded siRNA molecule may be located near the 3′ end of the flip ITR in an expression vector. In yet another embodiment, the encoded siRNA molecule may be located near the 5′ end of the flop ITR in an expression vector. In yet another embodiment, the encoded siRNA molecule may be located near the 3′ end of the flop ITR in an expression vector. In certain embodiments, the encoded siRNA molecule may be located between the 5′ end of the flip ITR and the 3′ end of the flop ITR in an expression vector. In certain embodiments, the encoded siRNA molecule may be located between (e.g., half-way between the 5′ end of the flip ITR and 3′ end of the flop ITR or the 3′ end of the flop ITR and the 5′ end of the flip ITR), the 3′ end of the flip ITR and the 5′ end of the flip ITR in an expression vector. As a non-limiting example, the encoded siRNA molecule may be located within 1, 2, 3, 4, 5, 6, 7, 8, 9, 10, 11, 12, 13, 14, 15, 16, 17, 18, 19, 20, 21, 22, 23, 24, 25, 26, 27, 28, 29, 30 or more than 30 nucleotides downstream from the 5′ or 3′ end of an ITR (e.g., Flip or Flop ITR) in an expression vector. As a non-limiting example, the encoded siRNA molecule may be located within 1, 2, 3, 4, 5, 6, 7, 8, 9, 10, 11, 12, 13, 14, 15, 16, 17, 18, 19, 20, 21, :22, 23, 24, 25, 26 27, 28, 29, 30 or more than 30 nucleotides upstream from the 5′ or 3′ end of an ITR (e.g., Flip or Flop ITR) in an expression vector. As another non-limiting example, the encoded siRNA molecule may be located within 1-5, 1-10, 1-15, 1-20, 1-25, 1-30, 5-10, 5-15, 5-20, 5-25, 5-30, 10-15, 10-20, 10-25, 10-30, 15-20, 15-25, 15-30, 20-25, 20-30 or 25-30 nucleotides downstream from the 5′ or 3′ end of an1′1′R (e.g., Flip or Flop ITR) in an expression vector. As another non-limiting example, the encoded siRNA molecule may he located within 1-5, 1-10, 1-15, 1-20, 1-25, 1-30, 5-10, 5-15, 5-20, 5-25, 5-30, 10-15, 10-20, 10-25, 10-30, 15-20, 15-25, 15-30, 20-25, 20-30 or 25-30 upstream from the 5′ or 3′ end of an ITR (e.g., Flip or Flop ITR) in an expression vector. As a non-limiting example, the encoded siRNA molecule may be located within the first 1%, 2%, 3%, 4%, 5%, 6%, 7%, 8%, 9%, 10%, 15%, 20%, 25% or more than 25% of the nucleotides upstream from the 5′ or 3′ end of an ITR (e.g., Flip or Flop ITR) in an expression vector. As another non-limiting example, the encoded siRNA molecule may be located with the first 1-5%, 1-10%, 1-15%, 1-20%, 1-25%, 5-10%, 5-15%, 5-70%, 5-25%, 10-15%, 10-70%, 10-75%, 15-70%, 15-25%, or 20-25% downstream from the 5′ or 3′ end of an ITR (e.g., Flip or Flop ITR) in an expression vector.

[0364] In certain embodiments, AAV particle comprising the nucleic acid sequence for the siRNA molecules of the present disclosure may be formulated for CNS delivery. Agents that cross the brain blood barrier may be used. For example, some cell penetrating peptides that can target siRNA molecules to the brain blood barrier endothelium may be used to formulate the siRNA duplexes targeting the gene of interest.

[0365] In certain embodiments, the formulated AAV particle comprising a nucleic acid sequence encoding the siRNA molecules of the present disclosure may be administered directly to the CNS. As a non-limiting example, the vector comprises a nucleic acid sequence encoding the siRNA molecules targeting the gene of interest.

[0366] In specific embodiments, compositions of formulated AAV particles comprising a nucleic acid sequence encoding the siRNA molecules of the present disclosure may be administered in a way which facilitates the vectors or siRNA molecule to enter the central nervous system and penetrate into motor neurons.

[0367] In certain embodiments, the formulated AAV particle may be administered to a subject (e.g., to the CNS of a subject via intrathecal administration) in a therapeutically effective amount for the siRNA duplexes or dsRNA to target the motor neurons and astrocytes in the spinal cord and/or brain stem. As a non-limiting example, the siRNA duplexes or dsRNA may reduce the expression of a protein or mRNA,

### II. AAV PRODUCTION

### General Viral Production Process

[0368] Viral production cells for the production of rAAV particles generally comprise mammalian cell types. However, mammalian cells present several complications to the large-scale production of rAAV particles, comprising general low yield of viral-particles-per-replication-cell as well as high risks for undesirable contamination from other mammalian biomaterials in the viral production cell. As a result, insect cells have become an alternative vehicle for large-scale production of rAAV particles,

[0369] AAV production systems using insect cells also present a range of complications. For example, high-yield production of rAAV particles often requires a lower expression of Rep78 compared to Rep52. Controlling the relative expression of Rep78 and Rep52 in insect cells thus requires carefully designed control mechanisms within the Rep operon. These control mechanisms can comprise individually engineered insect cell promoters, such as ALE1 promoters for Rep78 and Poll-I promoters for Rep52, or the division of the Rep-encoding nucleotide sequences onto independently engineered sequences or constructs. However, implementation of these control mechanisms often leads to reduced rAAV particle yield or to structurally unstable virions.

[0370] In another example, production of rAAV particles requires VP1, VP2 and VP3 proteins which assemble to form the AAV capsid. High-yield production of rAAV particles requires adjusted ratios of VP1, VP2 and VP3, which should generally be around 1:1:10, respectively, but can vary from 1-2 for VP1 and/or 1-2 for VP2, relative to 10 VP3 copies. This ratio is important for the quality of the capsid, as too much VP1 destabilizes the capsid and too little VP1 will decrease the infectivity of the vines.

[0371] Wild type AAV use a deficient splicing method to control VP1 expression; a weak start codon (ACG) with special surrounding (“Kozak” sequence) to control VP2, and a standard start codon (ATG) for VP3 expression. However, in some baculovirus systems, the mammalian splicing sequences are not always recognized and unable to properly control the production of VP1, VP2 and VP3. Consequently, neighboring nucleotides and the ACG start sequence from VP2 can be used to drive capsid protein production. Unfortunately, for most of the AAV serotypes, this method creates a capsid with a lower ratio of VP1 compared to VP2 (<1 relative to 10 VP3 copies). To more effectively control the production of VP proteins, non-canonical or start codons have been used, like TTG, GTG or CTG. However, these start codons can be considered suboptimal by those in the art relative to the wild type ATG or ACG start codons (See, WO2007046703 and WO2007148971, the content of which is incorporated herein by reference in its entirety as related to production of AAV capsid proteins, insofar as it does not conflict with the present disclosure).

[0372] In another example, production of rAAV particles using a baculovirus/SD system generally requires the widely used bacmid-based Baculovirus Expression Vector System (BEVs), which are not optimized for large-scale AAV production. Aberrant proteolytic degradation of viral proteins in the bacmid-based BEVs is an unexpected issue, precluding the reliable large-scale production of AAV capsid proteins using the baculovims/Sf9 system.

[0373] There is continued need for methods and systems which allow for effective and efficient large scale (commercial) production of rAAV particles in mammalian and insect cells.

[0374] The details of one or more embodiments of the present disclosure are set forth in the accompanying description below. Other features, objects, and advantages of the present disclosure will be apparent from the description, drawings, and the claims. In the description, the singular forms also comprise the plural unless the context clearly dictates otherwise. Unless defined otherwise, all technical and scientific terms used herein have the same meaning as commonly understood by one of ordinary skill in the art to which this present disclosure belongs. In the case of conflict with disclosures incorporated by reference, the present express description will control.

[0375] In certain embodiments, the constructs, polynucleotides, polypeptides, vectors, serotypes, capsids formulations, or particles of the present disclosure may be, may comprise, may be modified by, may be used by, may be used for, may be used with, or may be produced with any sequence, element, construct, system, target or process described in one of the following International Publications: WO2016073693, WO2017023724, WO2016077687, WO2016077689, WO2018204786, WO2017201258, WO2017201248, WO2018204803, WO2018204797, WO2017189959, WO2017189963, WO2017189964, WO2015191508, WO2016094783, WO20160137949, WO2017075335; the contents of which are each incorporated herein by reference in their entireties, insofar as they do not conflict with the present disclosure.

[0376] AAV production of the present disclosure comprises processes and methods for producing AAV particles and viral vectors which can contact a target cell to deliver a payload, e.g. a recombinant viral construct, which comprises a nucleotide encoding a payload molecule. In certain embodiments, the viral vectors are adeno-associated viral (AAV) vectors such as recombinant adeno-associated viral (rAAV) vectors. In certain embodiments, the AAV particles are adeno-associated viral (AAV) particles such as recombinant adeno-associated viral (rAAV) particles.

[0377] The present disclosure provides methods of producing AAV particles or viral vectors by (a) contacting a viral production cell with one or more viral expression constructs encoding at least one AAV capsid protein and/or at least one AAV replication protein, and one or more payload construct vectors, wherein said payload construct vector comprises a payload construct encoding a payload molecule selected from the group consisting of a transgene, a polynucleotide encoding protein, and a modulatory nucleic acid; (I)) culturing said viral production cell under conditions such that at least one AAV particle or viral vector is produced, and (c) isolating said at least one AAV particle or viral vector.

[0378] In these methods a viral expression construct may encode at least one structural protein and/or at least one non-structural protein. The structural protein may comprise any of the native or wild type capsid proteins VP1, VP2 and/or VP3 or a chimeric protein. The non-structural protein may comprise any of the native or wild type Rep78, Rep68, Rep52 and/or Rep40 proteins or a chimeric protein.

[0379] In certain embodiments, contacting occurs via transient transfection, viral transduction and/or electroporation.

[0380] In certain embodiments, the viral production cell is selected from the group consisting of a mammalian cell and an insect cell. In certain embodiments, the insect cell comprises a Spodoptera frugiperda insect cell. In certain embodiments, the insect cell comprises a S19 insect cell. In certain embodiments, the insect cell comprises a Sf21 insect cell.

[0381] The payload construct vector of the present disclosure may comprise at least one inverted terminal repeat (ITR) and may comprise mammalian DNA.

[0382] Also provided are AAV particles and viral vectors produced according to the methods described herein.

[0383] The AAV particles of the present disclosure may be formulated as a pharmaceutical composition with one or more acceptable excipients.

[0384] In certain embodiments, an AAV particle or viral vector may be produced by a method described herein.

[0385] In certain embodiments, the AAV particles may be produced by contacting a viral production cell (e.g., an insect cell or a mammalian cell) with at least one viral expression construct encoding at least one capsid protein and at least one AAV replication protein, and at least one payload construct vector. The viral production cell may be contacted by transient transfection, viral transduction and/or electroporation. The payload construct vector may comprise a payload construct encoding a payload molecule such as, but not limited to, a transgene, a polynucleotide encoding protein, and a modulatory nucleic acid. The viral production cell can be cultured under conditions such that at least one AAV particle or viral vector is produced, isolated (e.g., using temperature-induced lysis, mechanical lysis and/or chemical lysis) and/or purified (e.g., using filtration, chromatography and/or immunoaffinity purification). As a non-limiting example, the payload construct vector may comprise mammalian DNA.

[0386] In certain embodiments, the AAV particles are produced in an insect cell (e.g., Spodoptera frugiperda (Sf9) cell) using the method described herein. As a non-limiting example, the insect cell is contacted using viral transduction which may comprise baculoviral transduction.

[0387] In another embodiment, the AAV particles are produced in a inamnialian cell using the method described herein. As a non-limiting example, the mammalian cell is contacted using transient transfection.

[0388] In certain embodiments, the viral expression construct may encode at least one structural protein and at least one non-structural protein. As a non-limiting example, the structural protein comprises VP1, VP2 and/or VP3. As another non-limiting example, the non-structural protein comprises Rep78, Rep68, Rep52 and/or Rep40.

[0389] In certain embodiments, the AAV particle production method described herein produces greater than 10¹, greater than 10², greater than 10³, greater than 10⁴ or greater than 10⁵ AAV particles in a viral production cell.

[0390] In certain embodiments, a process of the present disclosure comprises production of viral particles in a viral production cell using a viral production system which comprises at least one viral expression construct and at least one payload construct. The at least one viral expression construct and at least one payload construct can be co-transfected (e.g. dual transfection, triple transfection) into a viral production cell. The transfection is completed using standard molecular biology techniques known and routinely performed by a person skilled in the art. The viral production cell provides the cellular machinery necessary for expression of the proteins and other biomaterials necessary for producing the AAV particles, comprising Rep proteins which replicate the payload construct and Cap proteins which assemble to form a capsid that encloses the replicated payload constructs. The resulting AAV particle is extracted from the viral production cells and processed into a pharmaceutical preparation for administration.

[0391] Once administered, the AAV particles contact a target cell and enters the cell in an endosome. The AAV particle releases from the endosome and subsequently contacts the nucleus of the target cell to deliver the payload construct. The payload construct, e.g, recombinant viral construct, is delivered to the nucleus of the target cell wherein the payload molecule encoded by the payload construct may he expressed.

[0392] In certain embodiments, the process for production of viral particles utilizes seed cultures of viral production cells that comprise one or more baculoviruses (e.g., a Baculoviral Expression Vector (BEV) or a baculovirus infected insect cell (BIIC) that has been transfected with a viral expression construct and a payload construct vector). In certain embodiments, the seed cultures are harvested, divided into aliquots and frozen, and may be used at a later time point to initiate an infection of a naïve population of production cells.

[0393] Large scale production of AAV particles may utilize a bioreactor. The use of a bioreactor allows for the precise measurement and/or control of variables that support the growth and activity of viral production cells such as mass, temperature, mixing conditions (impellor RPM or wave oscillation), CO₂ concentration, O₂ concentration, gas sparge rates and volumes, gas overlay rates and volumes, pH, Viable Cell Density (VCD), cell viability, cell diameter, and/or optical density (OD). In certain embodiments, the bioreactor is used for batch production in which the entire culture is harvested at an experimentally determined tune point and AAV particles are purified. In another embodiment, the bioreactor is used for continuous production in which a portion of the culture is harvested at an experimentally determined time point fir purification of AAV particles, and the remaining culture in the bioreactor is refreshed with additional growth media components.

[0394] AAV viral particles can be extracted from viral production cells in a process which comprises cell lysis, clarification, sterilization and purification. Cell lysis comprises any process that disrupts the structure of the viral production cell, thereby releasing AAV particles. In certain embodiments cell lysis may comprise thermal shock, chemical, or mechanical lysis methods. Clarification can comprise the gross purification of the mixture of lysed cells, media components, and AAV particles. In certain embodiments, clarification comprises centrifugation and/or filtration, comprising but not limited to depth end, tangential flow, and/or hollow fiber filtration.

[0395] The end result of viral production is a purified collection of AAV particles which comprise two components: (1) a payload construct (e.g. a recombinant viral genome construct) and (2) a viral capsid.

[0396] In certain embodiments, such as the embodiment presented in FIG. 1, a viral production system or process of the present disclosure comprises steps for producing baculovirus infected insect cells (BACs) using Viral Production Cells (VPC) and plasmid constructs. Viral Production Cells (VPCs) from a Cell Bank (CB) are thawed and expanded to provide a target working volume and VPC concentration, The resulting pool of VPCs is split into a Rep/Cap VPC pool and a Payload VPC pool. One or more Rep/Cap plasmid constructs (viral expression constructs) are processed into Rep/Cap Bacmid polynucleotides and transfected into the Rep/Cap VPC pool. One or more Payload plasmid constructs (payload constructs) are processed into Payload Bacmid polynucleotides and transfected into the Payload VPC pool. The two VPC pools are incubated to produce PI Rep/Cap Baculoviral Expression Vectors (BEVs) and P1 Payload BEVs. The two BEV pools are expanded into a collection of Plaques, with a single Plaque being selected for Clonal Plaque (CP) Purification (also referred to as Single Plaque Expansion). The process can comprise a single CP Purification step or can comprise multiple CP Purification steps either in series or separated by other processing steps. The one-or-more CP Purification steps provide a CP Rep/Cap BEV pool and a CP Payload BEV pool. These two BEV pools can then be stored and used for future production steps, or they can be then transfected into VPCs to produce a Rep/Cap BIIC pool and a Payload BIIC pool.

[0397] In certain embodiments, such as the embodiment presented in FIG. 2, a viral production system or process of the present disclosure comprises steps for producing AAV particles using Viral Production Cells (VPC) and baculovirus infected insect cells (BIICs). Viral Production Cells (VPCs) from a Cell Bank (CB) are thawed and expanded to provide a target working volume and VPC concentration. The working volume of Viral Production Cells is seeded into a Production Bioreactor and can be further expanded to a working volume of 200-2000 L with a target VPC concentration for BIIC infection. The working volume of VPCs in the Production Bioreactor is then co-infected with Rep/Cap BIICs and Payload BACs, with a target VPC:BIIC ratio and a target BIIC:BIIC ratio. VCD infection can also utilize BEVs. The co-infected VPCs are incubated and expanded in the Production Bioreactor to produce a bulk harvest of AAV particles and VPCs.

[0398] In certain embodiments, such as the embodiment presented in FIG. 3, a viral production system or process of the present disclosure comprises steps for producing a Drug Substance by processing, clarifying and purifying a bulk harvest of AAV particles and Viral Production Cells. A bulk harvest of AAV particles and VPCs (within a Production Bioreactor) are processed through cellular disruption and lysis (e.g, chemical lysis and/or mechanical lysis), followed by nuclease treatment of the lysis pool, thereby producing a crude lysate pool. The crude lysate pool is processed through one or more filtration and clarification steps, comprising depth filtration and microfiltration to provide a clarified lysate pool. The clarified lysate pool is processed through one or more chromatography and. purification steps, comprising affinity chromatography (AFC) and ion-exchange chromatography (AEX or CEX) to provide a purified product pool. The purified product pool is then optionally processed through nanofiltration, and then through tangential flow filtration (TFF). The TFF process comprises one or more diafiltration (DF) steps and one or more ultrafiltration (UF) steps, either in series or alternating. The product pool is further processed through viral retention filtration (VRF) and another filtration step to provide a drug substance pool. The drug substance pool can be further filtered, then aliquoted into vials for storage and treatment.

### Viral Expression Constructs

[0399] The viral production system of the present disclosure comprises one or more viral expression constructs which can be transfected./transduced into a viral production cell. In certain embodiments, a viral expression construct or a payload construct of the present disclosure can be a bacmid, also known as a baculovirus plasmid or recombinant baculovirus genotne. In certain embodiments, the viral expression comprises a protein-coding nucleotide sequence and at least one expression control sequence for expression in a viral production cell. In certain embodiments, the viral expression comprises a protein-coding nucleotide sequence operably linked to least one expression control sequence for expression in a viral production cell. In certain embodiments, the viral expression construct contains parvoviral genes under control of one or more promoters. Parvoviral genes can comprise nucleotide sequences encoding non-structural AAV replication proteins, such as Rep genes which encode Rep52, Rep40, Rep68 or Rep78 proteins. Parvoviral genes can comprise nucleotide sequences encoding structural AAV proteins, such as Cap genes which encode VP1, VP2 and VP3 proteins.

[0400] The viral production system of the present disclosure is not limited by the viral expression vector used to introduce the parvoviral functions into the virus replication cell. The presence of the viral expression construct in the virus replication cell need not be permanent. The viral expression constructs can be introduced by any means known, for example by chemical treatment of the cells, electroporation, or infection.

[0401] Viral expression constructs of the present disclosure may comprise any compound or formulation, biological or chemical, which facilitates transformation, transfection, or transduction of a cell with a nucleic acid. Exemplary biological viral expression constructs comprise plasmids, linear nucleic acid molecules, and recombinant viruses comprising baculovirus. Exemplary chemical vectors comprise lipid complexes. Viral expression constructs are used to incorporate nucleic acid sequences into virus replication cells in accordance with the present disclosure. (O'Reilly, David R., Lois K. Miller, and Verne A. Luckow. Baculovirus expression vectors: a laboratory manual. Oxford University Press, 1994.); Maniatis et al., eds. Molecular Cloning. CSH Laboratory, NY, N.Y. (1982); and, Philiport and Scluber, eds. Liposoes as tools in Basic Research and Industry. CRC Press, Ann Arbor, Mich. (1995), the contents of which are each incorporated herein by reference in their entireties as related to viral expression constructs and uses thereof, insofar as they do not conflict with the present disclosure.

[0402] In certain embodiments, the viral expression construct is an AAV expression construct which comprises one or more nucleotide sequences encoding non-structural AAV replication proteins, structural AAV capsid proteins, or a combination thereof.

[0403] In certain embodiments, the viral expression construct of the present disclosure may be a plasmid vector. In certain embodiments, the viral expression construct of the present disclosure may be a baculoviral construct.

[0404] The present disclosure is not limited by the number of viral expression constructs employed to produce AAV particles or viral vectors. In certain embodiments, one, two, three, four, five, six, or more viral expression constructs can be employed to produce AAV particles in viral production cells in accordance with the present disclosure. In one non-limiting example, five expression constructs may individually encode AAV VP1, AAV VP2, AAV VP3, Rep52, Rep78, and with an accompanying payload construct comprising a payload polynucleotide and at least one AAV ITR. In another embodiment, expression constructs may be employed to express, for example, Rep52 and Rep40, or Rep78 and Rep 68. Expression constructs may comprise any combination of VP1, VP2, VP3, Rep52/Rep40, and Rep78/Rep68 coding sequences.

[0405] In certain embodiments of the present disclosure, a viral expression construct may be used for the production of an AAV particles in insect cells. In certain embodiments, modifications may be made to the wild type AAV sequences of the capsid and/or rep genes, for example to improve attributes of the viral particle, such as increased infectivity or specificity, or to enhance production yields.

[0406] In certain embodiments, the viral expression construct may encode the components of a Parvoviral capsid with incorporated Gly-Ala repeat region, which may function as an immune invasion sequence, as described in US Patent Application 20110171262, the content of which is incorporated herein by reference in its entirety as related to Parvoviral capsid proteins, insofar as it does not conflict with the present disclosure.

[0407] In certain embodiments of the present disclosure, a viral expression construct may be used for the production of AAV particles in insect cells. In certain embodiments, modifications may be made to the wild type AAV sequences of the capsid and/or rep genes, for example to improve attributes of the viral particle, such as increased infectivity or specificity, or to enhance production yields from insect cells.

[0408] In certain embodiments, a VP-coding region encodes one or more AAV capsid proteins of a specific AAV serotype. The AAV serotypes for VP-coding regions can be the same or different. In certain embodiments, a VP-coding region can be codon optimized. In certain embodiments, a VP-coding region or nucleotide sequence can be codon optimized for a mammal cell. In certain embodiments, a VP-coding region or nucleotide sequence can be codon optimized for an insect cell. In certain embodiments, a VP-coding region or nucleotide sequence can be codon optimized for a Spodoptera frugiperda cell. In certain embodiments, a VP-coding region or nucleotide sequence can be codon optimized for Sf9 or Sf21 cell lines.

[0409] In certain embodiments, a nucleotide sequence encoding one or more VP capsid proteins can be codon optimized to have a nucleotide homology with the reference nucleotide sequence of less than 100%, In certain embodiments, the nucleotide homology between the codon-optimized VP nucleotide sequence and the reference VP nucleotide sequence is less than 100%, less than 99%, less than 98%, less than 97%, less than 96%, less than 95%, less than 94%, less than 93%, less than 92%, less than 91%, less than 90%, less than 89%, less than 88%, less than 87%, less than 86%, less than 85%, less than 84%, less than 83%, less than 82%, less than 81%, less than 80%, less than 78%, less than 76%, less than 74%, less than 72%, less than 70%, less than 68%, less than 66%, less than 64%, less than 62%, less than 60%, less than 55%, less than 50%, and less than 40%. VP-coding region

[0410] In certain embodiments, a viral expression construct can comprise a VP-coding region; a VP-coding region is a nucleotide sequence which comprises a VP nucleotide sequence encoding VP1, VP2, VP3, or a combination thereof. in certain embodiments, a viral expression construct can comprise a VP I-coding region; a VPI-coding region is a nucleotide sequence which comprises a VP1 nucleotide sequence encoding a VP1 protein. In certain embodiments, a viral expression construct can comprise a VP2-coding region; a VP2-coding region is a nucleotide sequence which comprises a VP2 nucleotide sequence encoding a VP2 protein. In certain embodiments, a viral expression construct can comprise a VP3-coding region; a VP3-coding region is a nucleotide sequence which comprises a VP3 nucleotide sequence encoding a VP3 protein.

[0411] Structural VP proteins, VP1, VP2, and. VP3 of a viral expression construct can be encoded in a single open reading frame regulated by utilization of both alternative splice acceptor and non-canonical translational initiation codons. VP1, VP2 and VP3 can be transcribed and translated from a single transcript in which both in-frame and/or out-of-frame start codons are engineered to control the VP1:VP2:VP3 ratio produced by the nucleotide transcript. In certain embodiments, VP1 can be produced from a sequence which encodes for VP1 only. As use herein, the terms “only for VP1” or “VP1 only” refers to a nucleotide sequence or transcript which encodes for a VP1 capsid protein and: (i) lacks the necessary start codons within the VP1 sequence (i.e. deleted or mutated) for full transcription or translation of VP2 and VP3 from the same sequence; (ii) comprises additional codons within the VP1 sequence which prevent transcription or translation of VP2 and VP3 from the same sequence; or (iii) comprises a start codon for VP1 (e.g. ATG), such that VP1 is the primary VP protein produced by the nucleotide transcript.

[0412] In certain embodiments, VP2 can be produced from a sequence which encodes for VP2 only. As use herein, the terms “only for VP2” or “VP2 only” refers to a nucleotide sequence or transcript which encodes for a VP2 capsid protein and: (i) the nucleotide transcript is a truncated variant of a full VP capsid sequence which encodes only VP2 and VP3 capsid proteins; and (ii) which comprise a start codon for VP2 (e.g. ATG), such that VP2 is the primary VP protein produced by the nucleotide transcript.

[0413] In certain embodiments, VP1 and VP2 can he produced from a sequence which encodes for VP1 and VP2 only. As use herein, the terns “only for VP1 and VP2” or “VP1 and VP2 only” refer to a nucleotide sequence or transcript which encodes for VP1 and VP2 capsid proteins and: (i) lacks the necessary start codons within the VP sequence (i.e. deleted or mutated) for full transcription or translation of VP3 from the same sequence; (ii) comprises additional codons within the VP sequence which prevent transcription or translation of VP3 from the same sequence; (iii) comprises a start codon for VP1 (e.g. ATG) and VP2 (e.g. ATG), such that VP1 and VP2 are the primary VP protein produced by the nucleotide transcript; or (iv) comprises VP1-only nucleotide transcript and a VP2-only nucleotide transcript connected by a linker, such as an IRES region.

[0414] In certain embodiments, the viral expression construct may contain a nucleotide sequence which comprises start codon region, such as a sequence encoding AAV capsid proteins which comprise one or more start codon regions. In certain embodiments, the start codon region can be within an expression control sequence. The start codon can be ATG or a non-ATG codon (i.e., a suboptimal start codon where the start codon of the AAV VP1 capsid protein is a non-ATG). In certain embodiments, the viral expression construct used for AAV production may contain a nucleotide sequence encoding the AAV capsid proteins where the initiation codon of the AAV VP1 capsid protein is a non-ATG, i.e., a suboptimal initiation codon, allowing the expression of a modified ratio of the viral capsid proteins in the production system, to provide improved infectivity of the host cell. In a non-limiting example, a viral construct vector may contain a nucleic acid construct comprising a nucleotide sequence encoding AAV VP1, VP2, and VP3 capsid proteins, wherein the initiation codon for translation of the AAV VP1 capsid protein is CTG, TTG, or GTG, as described in . U.S. Pat. No. 8,163,543, the content of which is incorporated herein by reference in its entirety as related to AAV capsid proteins and the production thereof, insofar as it does not conflict with the present disclosure.

### Rep-Coding Region

[0415] In certain embodiments, a viral expression construct can comprise a Rep52-coding region; a Rep52-coding region is a nucleotide sequence which comprises a Rep52 nucleotide sequence encoding a Rep52 protein. In certain embodiments, a viral expression construct can comprise a Rep78-coding region; a Rep78-coding region is a nucleotide sequence which comprises a Rep78 nucleotide sequence encoding a Rep78 protein. In certain embodiments, a viral expression construct can comprise a Rep40-coding region; a Rep40-coding region is a nucleotide sequence which comprises a Rep40 nucleotide sequence encoding a Rep40 protein. In certain embodiments, a viral expression construct can comprise a Rep68-coding region; a Rep68-coding region is a nucleotide sequence which comprises a Rep68 nucleotide sequence encoding a Rep68 protein.

[0416] Non-structural proteins, Rep52 and Rep78, of a viral expression construct can be encoded in a single open reading frame regulated by utilization of both alternative splice acceptor and non-canonical translational initiation codons.

[0417] Both Rep78 and Rep52 can be translated from a single transcript: Rep78 translation initiates at a first start codon (AUG or non-AUG) and Rep52 translation initiates from a Rep52 start codon AUG) within the Rep78 sequence, Rep78 and Rep52 can also he translated from separate transcripts with independent start codons. The Rep52 initiation codons within the Rep78 sequence can be mutated, modified or removed, such that processing of the modified Rep78 sequence will not produce Rep52 proteins.

[0418] In certain embodiments, the viral expression construct of the present disclosure may be a plasmid vector or a baculoviral construct that encodes the parvoviral rep proteins for expression in insect cells. In certain embodiments, a single coding sequence is used for the Rep78 and Rep52 proteins, wherein start codon for translation of the Rep78 protein is a suboptimal start codon, selected from the group consisting of ACG, TTG, CTG and GTG, that effects partial exon skipping upon expression in insect cells, as described in U.S. Pat. No. 8,512,981, the content of which is incorporated herein by reference in its entirety as related to the promotion of less abundant expression of Rep78 as compared to Rep52 to promote high vector yields, insofar as it does not conflict with the present disclosure.

[0419] In certain embodiments, the viral expression construct may be a plastnid vector or a baculoviral construct for the expression in insect cells that contains repeating codons with differential codon biases, for example to achieve improved ratios of Rep proteins, e.g. Rep78 and Rep52 thereby improving large scale (commercial) production of viral expression construct and/or payload construct vectors in insect cells, as taught in U.S. Pat. No. 8,697,417, the content of which is incorporated herein by reference in its entirety as related to AAV replication proteins and the production thereof, insofar as it does not conflict with the present disclosure.

[0420] In certain embodiment, improved ratios of rep proteins may be achieved using the method and constructs described in U.S. Pat. No. 8,642,314, the content of which is incorporated herein by reference in its entirety as related to AAV replications proteins and the production thereof, insofar as it does not conflict with the present disclosure.

[0421] In certain embodiments, the viral expression construct may encode mutant parvoviral Rep polypeptides which have one or more improved properties as compared with their corresponding wild type Rep polypeptide, such as the preparation of higher virus titers for large scale production. Alternatively, they may be able to allow the production of better-quality viral particles or sustain more stable production of virus. in a non-limiting example, the viral expression construct may encode mutant Rep polypeptides with a mutated nuclear localization sequence or zinc finger domain, as described in Patent Application US 20130023034, the content of which is incorporated herein by reference in its entirety as related to AAV replications proteins and the production thereof, insofar as it does not conflict with the present disclosure.

### REN Access Points and Polynucleotide Inserts

[0422] In certain embodiments, a viral expression construct or a payload construct of the present disclosure can be a bacmid, also known as a baculovirus plasmid or recombinant baculovirus genome. In certain embodiments, a viral expression construct or a payload construct of the present disclosure (e.g. bacmid) can comprise a polynucleotide incorporated by homologous recombination (transposon donor/acceptor system) into the bacmid by standard molecular biology techniques known and performed by a person skilled in the art,

[0423] In certain embodiments, the polynucleotide incorporated into the bacmid (i.e. polynucleotide insert) can comprise an expression control sequence operably linked to a protein-coding nucleotide sequence. In certain embodiments, the polynucleotide incorporated into the bacmid can comprise an expression control sequence which comprises a promoter, such as p10 or polH, and which is operably linked to a nucleotide sequence which encodes a structural AAV capsid protein (e.g. VP1, VP2, VP3 or a combination thereof). In certain embodiments, the polynucleotide incorporated into the bacmid can comprise an expression control sequence which comprises a promoter, such as p10 or polH, and which is operably linked to a nucleotide sequence which encodes a non-structural AAV capsid protein (e.g. Rep78, Rep52, or a combination thereof).

[0424] In certain embodiments, the polynucleotide insert can be incorporated into the bacmid at the location of a baculoviral gene. In certain embodiments, the polynucleotide insert can be incorporated into the bacmid at the location of a non-essential baculoviral gene. In certain embodiments, the polynucleotide, insert can be incorporated into the bacmid by replacing a baculoviral gene or a portion of the baculoviral gene with the polynucleotide insert. In certain embodiments, the polynucleotide insert can be incorporated into the bacmid by replacing a baculoviral gene or a portion of the baculoviral gene with a fusion-polynucleotide which comprises the polynucleotide insert and the baculoviral gene (or portion thereof) being replaced.

[0425] In certain embodiments, the polynucleotide insert can be incorporated into the bacmid by splitting a baculoviral gene with the polynucleotide insert (i.e. the polynucleotide insert is incorporated into the middle of the gene, separating a 5′-portion of the gene from a 3′-portion of the bacmid gene). In certain embodiments, the polynucleotide insert can be incorporated into the bacmid by splitting a baculoviral gene with the fusion-polynucleotide which comprises the polynucleotide insert and a portion of the baculoviral gene which was split. In certain embodiments, the 3′ end of the fusion-polynucleotide comprises the 5′-portion of the gene that was split, such that the 5′-portion of the gene in the fusion-polynucleotide and the 3′-portion of the gene remaining in the bacmid form a full or functional portion of the baculoviral gene. In certain embodiments, the 5′ end of the fusion-polynucleotide comprises the 3′-portion of the gene that was split, such that the 3′-portion of the gene in the fusion-polynucleotide and the 5′-portion of the gene remaining in the bacmid form a full or functional portion of the baculoviral gene.

[0426] In certain embodiments, the polynucleotide can he incorporated into the bacmid at the location of a restriction endonuclease (REN) cleavage site (i.e. REN access point) associated with a baculoviral gene. In certain embodiments, the REN access point in the bacmid is FseI (corresponding with the gta baculovirus gene) (ggccggcc). In certain embodiments, the REN access point in the bacmid is Sdal. (corresponding with the DNA polymerase baculovirus gene) (cctgcagg). In certain embodiments, the REN access point in the bacmid is MauBI (corresponding with the lef-1 baculovirus gene) (cgcgcgcg). In certain embodiments, the REN access point in the bacmid is SbfI (corresponding with the gp64/gp67 baculovirus gene) (cctgcagg). In certain embodiments, the REN access point in the bacmid is I-CeuI (corresponding with the v-cath baculovirus gene) (SEQ ID NO: 1752). In certain embodiments, the REN access point in the bacmid is AvrII (corresponding with the egt baculovirus gene) (cctagg). In certain embodiments, the REN access point in the bacmid is NheI (gctagc). In certain embodiments, the REN access point in the bacmid is SpeI (actagt). In certain embodiments, the REN access point in the bacmid is BstZ17I (gtatac). In certain embodiments, the REN access point in the bacmid is NcoI (ccatgg). In certain embodiments, the REN access point in the bacmid is MluI (acgcgt).

[0427] In certain embodiments where the bacmid is a double-stranded construct, the REN cleavage site can comprise a cleavage sequence in one strand and the reverse complement of the cleavage sequence (which also functions as a cleavage sequence) in the other strand. A polynucleotide insert (or strand thereof) can thus comprise a REN cleavage sequence or the reverse complement REN cleavage sequence (which are generally functionally interchangeable). As a non-limiting example, a strand of a polynucleotide insert can comprise an FseI cleave sequence (ggccggcc) or its reverse complement REN cleavage sequence (ccggccgg).

[0428] Polynucleotides can be incorporated into these REN access points by: (i) providing a polynucleotide insert which has been engineered to comprise a target REN cleavage sequence (e.g. a polynucleotide insert engineered to comprise FseI REN sequences at both ends of the polynucleotide); (ii) proving a bacmid which comprises the target REN access point for polynucleotide insertion (e.g. a variant of the AcMNPV bacmid bMON14272 which comprises an FseI cleavage site (ii) digesting the REN-engineered polynucleotide with the appropriate REN enzyme (e.g. using FseI enzyme to digesting the REN-engineering polynucleotide which comprises the FseI regions at both ends, to produce a polynucleotide-FseI insert); (iii) digesting the bacmid with the same REN enzyme to produce a single-cut bacmid at the REN access point (e.g. using FseI enzyme to produce a single-cut bacmid at the FseI location); and (iv) ligating the polynucleotide insert into the single-cut bacmid using an appropriate ligation enzyme, such as T4 ligase enzyme. The result is engineered bacmid. DNA which comprises the engineered polynucleotide insert at the target REN access point.

[0429] The insertion process can be repeated one or more times to incorporate other engineered polynucleotide inserts into the same bacmid at different REN access points (e.g. insertion of a first engineered polynucleotide insert at the AvrII REN access point in the egt, followed by insertion of a second engineered polynucleotide insert at the I-CeuI REN access point in the cath gene, and followed by insertion of a third enaineered polynucleotide insert at the FseI REN access point in the gta gene).

[0430] In certain embodiments, restriction endonuclease (REN) cleavage can be used to remove one or more wild-type genes from a bacmid. In certain embodiments, restriction endonuclease (REN) cleavage can be used to remove one or more engineered polynucleotide insert which has been previously been inserted into the bacmid. In certain embodiments, restriction endonuclease (REN) cleavage can be used to replace one or more engineered polynucleotide inserts with a different enaineered polynucleotide insert which comprises the same REN cleavage sequences (e.g. an engineered polynucleotide insert at the FseI REN access point can be replaced with a different engineered polynucleotide insert which comprises FseI REN cleavage sequences)

### Expression Control

### Expression Control Regions

[0431] The viral expression constructs of the present disclosure can comprise one or more expression control region encoded by expression control sequences. In certain embodiments, the expression control sequences are for expression in a viral production cell, such as an insect cell. In certain embodiments, the expression control sequences are operably linked to a protein-coding nucleotide sequence. In certain embodiments, the expression control sequences are operably linked to a VP coding nucleotide sequence or a Rep coding nucleotide sequence.

[0432] Herein, the terms “coding nucleotide sequence”, “protein-encoding gene” or “protein-coding nucleotide sequence” refer to a nucleotide sequence that encodes or is translated into a protein product, such as VP proteins or Rep proteins. “Operably linked” means that the expression control sequence is positioned relative to the coding sequence such that it can promote the expression of the encoded gene product.

[0433] “Expression control sequence” refers to a nucleic acid sequence that regulates the expression of a nucleotide sequence to which it is operably linked. An expression control sequence is “operably linked” to a nucleotide sequence when the expression control sequence controls and regulates the transcription and/or the translation of the nucleotide sequence. Thus, an expression control sequence can comprise promoters, enhancers, untranslated regions (UIRs), internal ribosome entry sites (IRES), transcription terminators, a start codon in front of a protein-encoding gene, splicing signal for introns, and stop codons. The term “expression control sequence” is intended to comprise, at a minimum, a sequence whose presence are designed to influence expression, and can also comprise additional advantageous components. For example, leader sequences and fusion partner sequences are expression control sequences. The term can also comprise the design of the nucleic acid sequence such that undesirable, potential initiation codons in and out of frame, are removed from the sequence. It can also comprise the design of the nucleic acid sequence such that undesirable potential splice sites arc removed. It comprises sequences or polyadenylation sequences (pA) which direct the addition of a polyA tail, i.e., a string of adenine residues at the 3′-end of an mIRNA, sequences referred to as polyA sequences. It also can be designed to enhance mRNA stability. Expression control sequences which affect the transcription and translation stability, e.g., promoters, as well as sequences which effect the translation, e.g,- Kozak sequences, are known in insect cells. Expression control sequences can be of such nature as to modulate the nucleotide sequence to which it is operably linked such that lower expression levels or higher expression levels are achieved. 104341 In certain embodiments, the expression control sequence can comprise one or more promoters. Promoters can comprise, but are not limited to, baculovirus major late promoters, insect virus promoters, non-insect virus promoters, vertebrate virus promoters, nuclear gene promoters, chimeric promoters from one or more species comprising virus and non-virus elements, and/or synthetic promoters. In certain embodiments, a promoter can be Ctx, Op-EI, EI, ΔEI, EI-1, pH, PIO, polH (polyhedron), ΔpolH, Dmhsp70, Hr1, Hsp70, 4xHsp27 EcRE+minimal Hsp70, IE, IE-1, ΔIE, p10, Δp10 (modified variations or derivatives of p10), p5, p19, p35, p40, p6.9, and variations or derivatives thereof. In certain embodiments, the promoter is a Ctx promoter. In certain embodiments, the promoter is a p10 promoter. In certain embodiments, the promoter is a polH promoter. In certain embodiments, a promoter can be selected from tissue-specific promoters, cell-type-specific promoters, cell-cycle-specific promoters, and variations or derivatives thereof. In certain embodiments, a promoter can be a CMV promoter, an alpha 1-antitrypsin (α1-AT) promoter, a thyroid hormone-binding globulin promoter, a thyroxine-binding globulin (LPS) promoter, an HCR-ApoCII hybrid promoter, an HCR-hAAT hybrid promoter, an albumin promoter, an apolipoprotein E promoter, an α1-AT÷EaIb promoter, a tumor-selective E2F promoter, a mononuclear blood IL-2 promoter, and variations or derivatives thereof. In certain embodiments, the promoter is a low-expression promoter sequence. In certain embodiments, the promoter is an enhanced-expression promoter sequence. In certain embodiments, the promoter can comprise Rep or Cap promoters as described in US Patent Application 20110136227, the content of which is incorporated herein by reference in its entirety as related to expression promoters, insofar as it does not conflict with the present disclosure.

[0434] In certain embodiments, a viral expression construct can comprise the same promoter in all nucleotide sequences. In certain embodiments, a viral expression construct can comprise the same promoter in two or more nucleotide sequences. In certain embodiments, a viral expression construct can comprise a different promoter in two or more nucleotide sequences. In certain embodiments, a viral expression construct can comprise a different promoter in all nucleotide sequences.

[0435] In certain embodiments the viral expression construct encodes elements to improve expression in certain cell types. In a further embodiment, the expression construct may comprise polh and/or ΔIE-1 insect transcriptional promoters, CMV mammalian transcriptional promoter, and/or p10 insect specific promoters for expression of a desired gene in a mammalian or insect cell.

[0436] More than one expression control sequence can be operably linked to a given nucleotide sequence. For example, a promoter sequence, a translation initiation sequence, and a stop codon can be operably linked to a nucleotide sequence.

[0437] In certain embodiments, the viral expression construct can comprise one or more expression control sequence between protein-coding nucleotide sequences. In certain embodiments, an expression control region can comprise an IRES sequence region which comprises an IRES nucleotide sequence encoding an internal ribosome entry sight (IRES). The internal ribosome entry sight (IRES) can be selected from the group consisting or: FMDV-IRES from Foot-and-Mouth-Disease virus, EMCV-IRES from Encephalomyocarditis virus, and combinations thereof.

[0438] In certain embodiments, an expression control region can comprise a 2A sequence region which comprises a 2A nucleotide sequence encoding a viral 2A peptide. The sequence allows for co-translation of multiple polypeptides within a single open reading frame (ORF). As the ORF is translated, glycine and prolific residues with the 2A sequence prevent the formation of a normal peptide bond, which results in ribosomal “skipping” and “self-cleavage” within the polypeptide chain. The viral 2A peptide can be selected from the group consisting of: F2A from Foot-and-Mouth-Disease virus, T2A from Thosea asigna virus, E2A from Equine rhinitis A virus, P2A from porcine teschovirus-I, BmCPV2A from cytoplasmic polyhedrosis virus, BmIFV 2A from B. mori flacherie virus, and combinations thereof.

[0439] In certain embodiments, the viral expression construct may contain a nucleotide sequence which comprises start codon region, such as a sequence encoding AAV capsid proteins which comprise one or more start codon regions. In certain embodiments, the start codon region can be within an expression control sequence.

[0440] The method of the present disclosure is not limited by the use of specific expression control sequences. However, when a certain stoichiometry of VP products are achieved (close to 1:1:10 for VP1, VP2, and VP3, respectively) and also when the levels of Rep52 or Rep40 (also referred to as the p19 Reps) are significantly higher than Rep78 or Rep68 (also referred to as the p5 Reps), improved yields of AAV in production cells (such as insect cells) may be obtained. In certain embodiments, the p5/p19 ratio is below 0.6 more, below 0.4, or below 0.3, but always at least 0.03. These ratios can be measured at the level of the protein or can be implicated from the relative levels of specific mRNAs.

[0441] In certain embodiments, AAV particles are produced in viral production cells (such as mammalian or insect cells) wherein all three VP proteins are expressed at a stoichiometry approaching, about or Which is 1:1:10 (VP1:VP2:VP3).

[0442] In certain embodiments, AAV particles are produced in viral production cells (such as mammalian or insect cells) wherein all three VP proteins are expressed at a stoichiometry approaching, about or which is 2:2:10 (VP1:VP2:VP3).

[0443] In certain embodiments, AAV particles are produced in viral production cells (such as mammalian or insect cells) wherein all three VP proteins are expressed at a stoichiometry approaching, about or which is 2:0:10 (VP1:VP2:VP3).

[0444] In certain embodiments, AAV particles are produced in viral production cells (such as mammalian or insect cells) wherein all three VP proteins are expressed at a stoichiometry approaching, about or which is 1-2:0-2:10 (VP1:VP2:VP3).

[0445] In certain embodiments, AAV particles are produced in viral production cells (such as mammalian or insect cells) wherein all three VP proteins are expressed at a stoichiometry approaching, about or which is 1-2:1-2:10 (VP1:VP2:VP3),

[0446] In certain embodiments, AAV particles are produced in viral production cells (such as mammalian or insect cells) wherein all three VP proteins are expressed at a stoichiometry approaching, about or Which is 2-3:0-3:10 (VP1:VP2:VP3).

[0447] In certain embodiments, AAV particles are produced in viral production cells (such as mammalian or insect cells) wherein all three VP proteins are expressed at a stoichiometry approaching, about or which is 2-3:2-3:10 (VP1:VP2:VP3).

[0448] In certain embodiments, AAV particles are produced in viral production cells (such as mammalian or insect cells) wherein all three VP proteins are expressed at a stoichiometry approaching, about or which is 3:3:10 (VP1:VP2:VP3).

[0449] In certain embodiments, AAV particles are produced in viral production cells (such as mammalian or insect cells) wherein all three VP proteins are expressed at a stoichiometry approaching, about or which is 3-5:0-5:10 (VP1: VP2:VP3).

[0450] In certain embodiments, AAV particles are produced in viral production cells (such as mammalian or insect cells) wherein all three VP proteins are expressed at a stoichiometry approaching, about or which is 3-5:3-5:10 (VP1:VP2:VP3).

[0451] In certain embodiments, the expression control regions are engineered to produce a VP1: VP2:VP3 ratio selected from the group consisting of: about or exactly 1:0:10; about or exactly 1:1:10; about or exactly 2:1:10; about or exactly 2:1:10; about or exactly 2:2:10; about or exactly 3:0:10; about or exactly 3:1:10; about or exactly 3:2:10; about or exactly 3:3:10; about or exactly 4:0:10; about or exactly 4:1:10; about or exactly 4:2:10; about or exactly 4:3:10; about or exactly 4:4:10; about or exactly 5:5:10; about or exactly 1-2:0-2:10; about or exactly 1-2:1-2:10; about or exactly 1-3:0-3:10; about or exactly 1-3:1-3:10; about or exactly 1-4:0-4:10; about or exactly 1-4:1-4:10; about or exactly 1-5:1-5:10; about or exactly 2-3:0-3:10; about or exactly 2-3:2-3:10; about or exactly 2-4:2-4:10; about or exactly 2-5:2-5:10; about or exactly 3-4:3-4:10; about or exactly 3-5:3-5:10; and about or exactly 4-5:4-5:10.

[0452] In certain embodiments of the present disclosure, Rep52 or Rep78 is transcribed from the baculoviral derived polyhedron promoter (polh). Rep52 or Rep78 can also be transcribed from a weaker promoter, for example a deletion mutant of the IE-1 promoter, the ΔIE-1 promoter, has about 20% of the transcriptional activity of that IE-1 promoter. A promoter substantially homologous to the ΔIE-1 promoter may be used. In respect to promoters, a homology of at least 50%, 60%, 70%, 80%, 90% or more, is considered to be a substantially homologous promoter.

### Engineered Untranslated Regions (UTRs)

[0453] The present disclosure presents enaineered untranslated regions (UTRs), comprising engineered UTR polynucleotides that function as a 5′ UTR, Engineering the features in untranslated regions (UTRs) can improve the stability and protein production capability of the viral production constructs of the present disclosure.

[0454] The present disclosure presents viral expression constructs which comprise an engineered untranslated region (UTR) of the present disclosure. In certain embodiments, the viral expression construct comprises an engineered untranslated region (UTR) of the present disclosure. In certain embodiments, the viral expression construct comprises an engineered 5′ UTR of the present disclosure.

[0455] Natural 5′ UTRs comprise features which play important roles in translation initiation. They harbor signatures such as a Kozak sequences which are known to be involved in the process by which the ribosome initiates translation of many genes. The present disclosure provides engineered polynucleotide sequences which comprise at least one 5′ UTR function. Such “engineered 5′ UTR polynucleotides” or “engineered 5′ UTRs” may also comprise the start codon of the protein whose expression is being driven, e.a., a structural AAV capsid protein (VP1, VP2 or VP3) or a non-structural AAV replication protein (Rep78 or Rep52).

[0456] According to the present disclosure, the engineered 5′ UTR polynucleotides may range independently from 15-1,000 nucleotides in length (e.g., greater than 30, 40, 45, 50, 55, 60, 70, 80, 90, 100, 120, 140, 160, 180, 200, 250, 300, 350, 400, 450, 500, 600 700, 800, and 900 nucleotides or at least 30, 40, 45, 50, 55, 60, 70, 80, 90, 100, 120, 140, 160, 180, 200, 250, 300, 350, 400, 450, 500, 600, 700, 800, 900, and 1,000 nucleotides). Non-UTR sequences may be incorporated into the engineered 5′ UTRs. For example, introns or portions of introns sequences may be incorporated into the polynucleotides of the disclosure. Incorporation of intronic sequences may also increase AAV serotype protein (e.g., capsid) production.

[0457] Leader sequences may be comprised in the engineered polynucleotides. Such leader sequences may derive from or be identical to all or a portion of any AAV serotype selected from those taught herein.

[0458] According to the present disclosure, the polynucleotides may comprise a consensus sequence which is discovered through rounds of experimentation. As used herein a “consensus” sequence is a single sequence which represents a collective population of sequences allowing for variability at one or more sites.

[0459] In certain embodiments, variants of the polynucleotides of the disclosure may be generated. These variants may have the same or a similar activity as the reference polynucleotide. Alternatively, the variant may have an altered activity (e.g., increased or decreased) relative to a reference polynucleotide. Generally, variants of a particular polynucleotides of the disclosure will have at least about 40%, 45%, 50%, 55%, 60%, 65%, 70%, 75%, 80%, 85%, 90%, 91%, 92%, 93%, 94%, 95%, 96%, 97%, 98%, 99% but less than 100% sequence identity to that particular reference polynucleotide as determined by sequence alignment programs and parameters described herein and known to those skilled in the art. Such tools for alignment comprise those of the BLAST suite (Stephen F. Altschul, Thomas L. Madden, Alejandro A. Schäffer, Jinghui Zhang, Zheng Zhang, Webb Miller, and David J. Lipman (1997), “Gapped BLAST and PSI-BLAST: a new generation of protein database search programs”, Nucleic Acids Res. 25:3389-3402.) Other tools are described herein, specifically in the definition of “identity.”

[0460] The engineered polynucleotides of the present disclosure may be incorporated into a vector or plasmid alone or in combination with other polynucleotide sequences or features such as those disclosed in International Publications WO2007046703 and WO2007148971 (disclosing alternative start codons and AAV vectors produced in insect cells); WO2009104964 (disclosing optimization of expression of AAV proteins in insect cells and involving alteration of promoter strength, enhancer elements, temperature control); and WO2015137802 (disclosing alternative start codons, removal of start codons and AAV vectors produced in insect cells), the contents of which are each incorporated herein by reference in their entireties, insofar as they do not conflict with the present disclosure.

[0461] In certain embodiments, the engineered 5′ UTR comprises or consists of between 80-120 nucleotides, between 90-110 nucleotides, between 95-105 nucleotides, between 98-100 nucleotides, or about 99 nucleotides. In certain embodiments, the engineered 5′ UTR comprises or consists of 24 nucleotides.

[0462] In certain embodiments, the engineered 5′ UTR is derived from AAV2. In certain embodiments, the engineered 5′ UTR is derived from AAV2. In certain embodiments, the engineered 5′ UTR is derived from AAV9. In certain embodiments, the engineered 5′ UTR is derived from AAVRh10. In certain embodiments, the engineered 5′ UTR is derived from AAVPHP.B. In certain embodiments, the engineered 5′ UTR is derived from an AAV serotype presented in Table 1.

### 5′ UTR Hairpin Structure

[0463] In certain embodiments, the engineered 5′ UTR comprises a hairpin structure. In certain embodiments, the engineered 5′ U′IR region comprises: a promoter 5′ (upstream) of a 5′ UTR which comprises an “A” region (a 5′ flanking region) which is 5′ (upstream) of a hairpin, a “B” region (a 3′ flanking region which can comprise a start codon and kozak nucleotides around the start codon) which is 3′ (downstream) from the stem loop, a “C” region representing the stem of a stein-loop structure, and a loop (which can range from 4-16 nucleotides). In certain embodiments, the hairpin structure can comprise all or a portion of a Kozak sequence, such as TTT. The promoter and 5′ UTR can be associated with either a CAP gene (which encodes the structural capsid proteins VP1, VP2 and/or VP3) or a REP gene (which encodes the non-structural replication proteins Rep78 and Rep52).

[0464] In certain embodiments, the engineered 5′ UTR comprises a hairpin structure encoded by a hairpin nucleotide sequence. In certain embodiments, the hairpin nucleotide sequence comprises a leader sequence. In certain embodiments, the hairpin nucleotide sequence comprises a leader sequence and a start codon (e.g. ATG). In certain embodiments, the hairpin nucleotide sequence comprises a leader sequence, and a start codon (e.g. ATG) within a Kozak sequence or modified Kozak sequence.

[0465] In certain embodiments, the engineered 5′ UTR comprises a hairpin structure, having a 5′ flanking region (i.e. upstream region) encoded by a 5′ flanking sequence. In certain embodiments, the 5′ flanking sequence may be of any length and may be derived in whole or in part from wild type AAV sequence or be completely artificial,

[0466] In certain embodiments, the engineered 5′ VTR. comprises a hairpin structure having a 3′ flanking region (i.e. downstream region) encoded by a 3′ flanking sequence. In certain embodiments, the 3′ flanking sequence may be of any length and may be derived in whole or in part from wild type AAV sequence or be completely artificial.

[0467] The 5′ flanking sequence and 3′ flanking sequence can have the same size and origin, a different size, a different origin, or a different size and origin. Either flanking sequence may be absent. The 5′ flanking sequence can comprise or consist of 2-50, 2-40, 2-30, 2-20, or 2-15 nucleotides. The 3′ flanking sequence can comprise or consist of 2-50, 2-40, 2-30, 2-20, or 2-15 nucleotides. The 3′ flanking sequence may optionally contain the start codon of an AAV protein or proteins as well as other sequences such as a Kozak or modified Kozak sequence.

[0468] In certain embodiments, the engineered 5′ UTR comprises a hairpin structure which comprises a step-loop structure. In certain embodiments, the hairpin structure comprises a stem region and a loop region. In certain embodiments, the hairpin structure comprises a stem region, a loop region, and a stem-complement region. The stem-loop structure can comprise a stein region encoded by a stem sequence. The stein-loop structure can comprise a loop region encoded by a loop sequence. The stem-loop structure can comprise a stem-complement region encoded by a stem-complement sequence. Forming the stem of the stem-loop structure of the hairpin are paired or substantially paired nucleobases of between 2 and 50 pairs. The stein may contain one or more mismatches, bulges or loops. In certain embodiments, the stem sequence and the stem-complement sequence are 100% complementary (i.e. zero mismatches). In certain embodiments, the stem sequence and the stem-complement sequence comprise zero, one, two, three, four or five mismatches.

[0469] In certain embodiments, the engineered 5′ UTR comprises a hairpin structure presented in Table 5, or a combination of Upstream, Stem (Upstream), Loop, Stem (Downstream) and/or Downstream components listed in Table 5. In The position of the loop portion of the hairpin is underlined in the sequence with the canonical ATG start codon in Capital Letters.

TABLE 5
5′ UTR Hairpin Structures

| | Hairpin | | | | | |
|---|---|---|---|---|---|---|
| Name | Sequence | Upstream | Stem-U | Loop | Stem-D | Downstream |
| HP1 | atacgactcgacgaaga | atacgactcgacgaag | aaccgtcggc | tttatggct | | |
| | cttgatcaaccgtcggct | acttgatc | SEQ ID NO: | | | |
| | ttATGgct | SEQ ID NO: 1769 | 1773 | | | |
| | SEQ ID NO: 1753 | | | | | |
| HP2 | atacgactcgacgaaga | atacgactcgacgaag | aaccAtcggc | tttatggct | | |
| | cttgatcaaccAtcggc | acttgatc | SEQ ID NO: | | | |
| | tttATGgct | SEQ ID NO: 1769 | 1774 | | | |
| | SEQ ID NO: 1754 | | | | | |
| HP3 | atacgactcgacgaaga | atacgactcgacgaag | aaccgtAggc | tttatggct | | |
| | cttgatcaaccgtAggc | acttgatc | SEQ ID NO: | | | |
| | tttATGgct | SEQ ID NO: 1769 | 1775 | | | |
| | SEQ ID NO: 1755 | | | | | |
| HP4 | atacgactcgacgaaga | atacgactcgacgaag | cggc | tttatggct | | |
| | cttgatcctgactcggct | acttgatcctgact | | | | |
| | ttATGgct | SEQ ID NO: 1770 | | | | |
| | SEQ ID NO: 1756 | | | | | |
| HP5 | atacgactcgacgaaga | atacgactcgacgaag | agTtaaccgtc | tttatggct | | |
| | cttagTtaaccgtcggc | actt | ggc | | | |
| | tttATGgct | SEQ ID NO: 1771 | SEQ ID NO: | | | |
| | SEQ ID NO: 1757 | | 1776 | | | |
| HP6 | atacgactcgacgaaga | atacgactcgacgaag | agTtaaccgtc | tttatggct | | |
| | cttagTtaccgtcCgc | actt | Cgc | | | |
| | tttATGgct | SEQ ID NO: 1771 | SEQ ID NO: | | | |
| | SEQ ID NO: 1758 | | 1777 | | | |
| HP7 | atacgactcgacgaaga | atacgactcgacgaag | agTtaacTgtc | tttatggct | | |
| | cttagTtaacTgtcCg | actt | Cgc | | | |
| | ctttATGgct | SEQ ID NO: 1771 | SEQ ID NO: | | | |
| | SEQ ID NO: 1759 | | 1778 | | | |
| HP8 | atacgactcgacgaaga | atacgactcgacgaag | ctgcc | atctaa | ggcag | tttatggct |
| | cctgccatctaaggcag | ac | | | | |
| | tttATGgct | SEQ ID NO: 1772 | | | | |
| | SEQ ID NO: 1760 | | | | | |
| HP9 | atacgactctgccagct | atacgact | ctgccagctc | atctaa | gagctggcag | tttatggct |
| | catctaagagctggcag | | SEQ ID NO: | | SEQ ID NO: | |
| | tttATGgct | | 1779 | | 1784 | |
| | SEQ ID NO: 1761 | | | | | |
| HP10 | atacgactctgccTgct | atacgact | ctgccTgctc | atctaa | gagctggcag | tttatggct |
| | catctaagagctggcag | | SEQ ID NO: | | SEQ ID NO: | |
| | tttATGgct | | 1780 | | 1784 | |
| | SEQ ID NO: 1762 | | | | | |
| HP11 | atacctgccagctcttcg | atac | ctgccagctcttc | atctaa | cgttagagctgg | tttatggct |
| | atctaacgaagagctgg | | g | | cag | |
| | cagtttATGgct | | SEQ ID NO: | | SEQ ID NO: | |
| | SEQ ID NO: 1763 | | 1781 | | 1785 | |
| HP12 | atacctgccTgctcttc | atac | ctgccTgctctt | atctaa | cgaagagagg | tttatggct |
| | gatctaacgaagagctg | | cg | | cag | |
| | gcagtttATGgct | | SEQ ID NO: | | SEQ ID NO: | |
| | SEQ ID NO: 1764 | | 1782 | | 1785 | |
| HP13 | atacctgccTgctcAtc | atac | ctgccTgctcA | atctaa | cgaagagctgg | tttatggct |
| | gatctaacgaagagctg | | tcg | | cag | |
| | gcagtttATGgct | | SEQ ID NO: | | SEQ ID NO: | |
| | SEQ ID NO: 1765 | | 1783 | | 1785 | |
| HP14 | atacctgccatctaagg | atac | ctgcc | atctaa | ggcag | gactcgacgaag |
| | caggactcgacgaaga | | | | | actttatggct |
| | ctttATGgct | | | | | SEQ ID NO: |
| | SEQ ID NO: 1766 | | | | | 1786 |
| HP15 | atacctgccagctcatct | atac | ctgccagctc | atctaa | gagctggcag | gacttttatggct |
| | aagagctggcaggactt | | SEQ ID NO: | | SEQ ID NO: | SEQ ID NO: |
| | ttATGAct | | 1779 | | 1784 | 1787 |
| | SEQ ID NO: 1767 | | | | | |
| HP16 | atacctgccTgctcatct | atac | ctgccTgctc | atctaa | gagctggcag | gacttttatggct |
| | aagagctggcaggactt | | SEQ ID NO: | | SEQ ID NO: | SEQ ID NO: |
| | ttATGgct | | 1780 | | 1784 | 1787 |
| | SEQ ID NO: 1768 | | | | | |

[0470] In certain embodiments, the engineered 5′ UTR. comprises a hairpin structure, or a component thereof, which is encoded by a hairpin nucleotide sequence selected from SEQ ID NO:1753-1768. In certain embodiments, the engineered 5′ UTR comprises a hairpin structure, or a component thereof, encoded by a nucleotide sequence having at least 60% identity, at least 65% identity, at least 70% identity, at least 75% identity, at least 80% identity, at least 85% identity, at least 90% identity or at least 95% identity to SEQ ID NO:1753-1768.

### G: C Content

[0471] In certain embodiments, the engineered 5′ UTRs of the present disclosure can comprise a nucleotide sequence, such as a leader sequence, which has varied G:C content or percentage. In certain embodiments, the 5′ flanking region of the 5′ UIRs have a varied G:C content. In certain embodiments, the stem of the 5′ UTRs has a varied (3:C content. In certain embodiments, the 3′ flanking region of the 5′ UTRs has a varied G:C content. In certain embodiments, the G:C content of the engineered 5′ UTR is 10-80%, 20-70%, 25%-65%, or 30%-60%. In certain embodiments, the G:C content of the engineered 5′ UTR is about 25%, about 30%, 34%, about 35%, about 40%, about 45%, about 50%, about 55%, 58%, about 60%, 62% or about 65%.

[0472] In certain embodiments, the engineered 5′ VTR comprises or consists of between 98-100 nucleotides, and comprises a G:C content of about 25%, about 30%, 34%, about 35%, about 40%, about 45%, about 50%, about 55%, 58%, about 60%, 62% or about 65%.

### Modified Kozak Sequences

[0473] The translational start site of eukaryotic mRNA is controlled in part by a nucleotide sequence referred to as a Kozak sequence as described in Kozak, M Cell. 1986 Jan. 31; 440:283-92 and Kozak, M. J Cell Biol. 1989 February; 108(2):229-41 the content of which is incorporated herein by reference in its entirety as related to Kozak sequences and. uses thereof, insofar as it does not conflict with the present disclosure. Both naturally occurring and synthetic (i.e. modified or engineered) translational start sites of the Kozak form can be used in the production of polypeptides by molecular genetic techniques, as described in Kozak, M. Mamm Genome. 1946 August; 7(8): 563-74, the content of which is incorporated herein by reference in its entirety as related to Kozak sequences and uses thereof, insofar as it does not conflict with the present disclosure. The Kozak consensus sequence is generally defined as GCCRCC(NNN)GC (SEQ. ID NO: 1788), wherein R is a purine (i.e. A or G) and wherein (NNN) stands for a translation initiation start codon, such as a suboptimal start codon. In certain embodiments, Kozak sequences are modified to provide leaky ribosome scanning of the VP-coding region. Any corresponding increase of VP1 production will conversely reduce VP3 translation, such that marginal changes of VP1 initiation rate can induce large changes in VPI/VP3 ratio. As used herein, the terms “modified Kozak sequence” or “engineered Kozak sequence” represent an altered Kozak sequence, such as, for example, a Kozak sequence which comprises nucleotide mutations, additions, or deletions.

[0474] In certain embodiments, the engineered 5′ UTRs of the present disclosure can comprise a modified Kozak sequence, such as a modified weak Kozak sequence. In certain embodiments, the engineered 5′ UTRs of the present disclosure can comprise a modified Kozak sequence which comprises or is associated with a VP start codon and/or VP translation initiation region. In certain embodiments, the engineered 5′ UTRs of the present disclosure can comprise a modified Kozak sequence which comprises or is associated with a VP1 start codon and/or VP1 translation initiation region. In certain embodiments, the engineered 5′ UTRs of the present disclosure can comprise a modified Kozak sequence which comprises or is associated with a VP2 start codon and/or VP2 translation initiation region. In certain embodiments, the engineered 5′ UTRs of the present disclosure can comprise a modified Kozak sequence which comprises or is associated with a VP3 start codon and/or VP3 translation initiation region.

[0475] In certain embodiments, the engineered 5′ UTRs of the present disclosure can comprise a modified Kozak sequence selected from Table 6.

TABLE 6
Modified Kozak Sequences

| Sequence | SEQ ID NO: |
|---|---|
| tttagatggct | 1789 |
| tttagatgttg | 1790 |
| tttttatgttg | 1791 |

[0476] In certain embodiments, the engineered 5′ UTRs of the present disclosure can comprise a modified Kozak sequence selected from SEQ ID NOS: 1789-1791. In certain embodiments, the engineered 5′ UTRs of the present disclosure can comprise a modified Kozak sequence which has at least 60% identity, at least 65% identity, at least 70% identity, at least 75% identity, at least 80% identity, at least 85% identity, at least 90% identity or at least 95% identity to a modified Kozak sequence selected from SEQ ID NOS: 1789-1791.

[0477] In certain embodiments, an engineered 5′ UTR. of the present disclosure can comprise the modified Kozak sequence of SEQ ID NO: 1789, In certain embodiments, an engineered 5′ UTR of the present disclosure can comprise the modified Kozak sequence of SEQ ID NO: 1790. In certain embodiments, an engineered 5′ UTR of the present disclosure can comprise the modified Kozak sequence of SEQ ID NO: 1791.

[0478] In certain embodiments, the modified Kozak sequence is engineered or selected to produce a VP1:VP2:VP3 ratio selected from: about or exactly 1:1:10; about or exactly 2:2:10; about or exactly 3:3:10; about or exactly 4:4:10; about or exactly 5:5:10; about or exactly 1-2:1-2:10; about or exactly 1-3:1-3:10; about or exactly 1-4:1-4:10; about or exactly 1-5:1-5:10; about or exactly 2-3:2-3:10; about or exactly 2-4:2-4:10; about or exactly 2-5:2-5:10; about or exactly 3-4:3-4:10; about or exactly 3-5:3-5:10; and about or exactly 4-5:4-5:10.

[0479] In certain embodiments, the present disclosure presents method of producing rAAV particles in a viral production cell such as an insect cell. In certain embodiments, the method comprises (i) transfecting a viral production cell (e.g. Sf insect cell) with a payload construct and viral expression construct which comprises a nucleotide sequence encoding a modified Kozak sequence and a sequence encoding VP1, VP2, and/or VP3 capsid proteins, and (ii) culturing the insect cell under conditions suitable to produce rAAV particles.

### Viral Production Cells and Vectors

### Mammalian Cells

[0480] Viral production of the present disclosure disclosed herein describes processes and methods for producing AAV particles or viral vector that contacts a target cell to deliver a payload construct, e.g. a recombinant AAV particle or viral construct, which comprises a nucleotide encoding a payload molecule. The viral production cell may be selected from any biological organism, comprising prokaryotic (e. g., bacterial) cells, and eukaryotic cells, comprising, insect cells, yeast cells and mammalian cells.

[0481] In certain embodiments, the AAV particles of the present disclosure may be produced in a viral production cell that comprises a mammalian cell. Viral production cells may comprise mammalian cells such as A549, WEH1, 3T3, 1.0T1/2, BHK, MDCK, COS 1, COS 7, BSC 1, BSC 40, BMT 10, VERO. W138, HeLa, HEK293, HEK293T (293T), Saos, C2C12, L cells, HT1080, HepG2 and primary fibroblast, hepatocyte and myoblast cells derived from mammals. Viral production cells can comprise cells derived from mammalian species comprising, but not limited to, human, monkey, mouse, rat, rabbit, and hamster or cell type, comprising but not limited to fibroblast, hepatocyte, tumor cell, cell line transformed cell, etc.

[0482] AAV viral production cells commonly used for production of recombinant AAV particles comprise, but is not limited to HEK293 cells. COS cells, C127, 3T3, CHO, HeLa cells, KB cells, BHK, and other mammalian cell lines as described in U.S. Pat. Nos. 6,156,303, 5,387,484, 5,741,683, 5,691,176, 6,428,988 and 5,688,676, U.S. patent application 2002/0081721, and International Patent Publication Nos. WO 00/47757, WO 00/24916, and WO 96/17947, the contents of which are each incorporated herein by reference in their entireties, insofar as they do not conflict with the present disclosure. In certain embodiments, the AAV viral production cells are trans-complementing packaging cell lines that provide functions deleted from a replication-defective helper virus, e.g., HEK293 cells or other Ea trans-complementing cells.

[0483] In certain embodiments, the packaging cell line 293-10-3 (ATCC Accession No. PTA-2361) may be used to produce the AAV particles, as described in U.S. Pat. No. 6,281,010, the content of which is incorporated herein by reference in its entirety as related to the 293-10-3 packaging cell line and uses thereof, insofar as it does not conflict with the present disclosure.

[0484] In certain embodiments, of the present disclosure a cell line, such as a HeLA cell line, for trans-complementing E1 deleted adenoviral vectors, which encoding adenovirus E1a and adenovirus E1b under the control of a phosphoglycerate kinase (PGK) promoter can be used for AAV particle production as described in U.S. Pat. No. 6,365,394, the content of which is incorporated herein by reference in its entirety as related to the HeLA cell line and uses thereof, insofar as it does not conflict with the present disclosure.

[0485] In certain embodiments, AAV particles are produced in mammalian cells using a triple transfection method wherein a payload construct, parvoviral Rep and parvoviral Cap and a helper construct are comprised within three different constructs. The triple transfection method of the three components of AAV particle production may be utilized to produce small lots of virus for assays comprising transduction efficiency, target tissue (tropism) evaluation, and stability.

[0486] AAV particles to be formulated may be produced by triple transfection or baculovirus mediated virus production, or any other method known in the art. Any suitable permissive or packaging cell known in the art may be employed to produce the vectors. In certain embodiments, trans-complementing packaging cell lines are used that provide functions deleted from a replication-defective helper virus, e.g., 293 cells or other E1a trans-complementing cells.

[0487] The gene cassette may contain some or all of the parvovirus (e.g., AAV) cap and rep genes. In certain embodiments, some or all of the cap and rep functions are provided in trans by introducing a packaging vector(s) encoding the capsid and/or Rep proteins into the cell. In certain embodiments, the gene cassette does not encode the capsid or Rep proteins. Alternatively, a packaging cell line is used that is stably transformed to express the cap and/or rep genes.

[0488] Recombinant AAV virus particles are, in certain embodiments, produced and purified from culture supernatants according to the procedure as described in US2016/0032254, the content of which is incorporated herein by reference in its entirety as related to the production and processing of recombinant AAV virus particles, insofar as it does not conflict with the present disclosure. Production may also involve methods known in the art comprising those using 293T cells, triple transfection or any suitable production method.

[0489] In certain embodiments, mammalian viral production cells (e.g. 293T cells) can be in an adhesion/adherent state (e.g. with calcium phosphate) or a suspension state (e.g. with polyethyleneimine (PEI). The mammalian viral production cell is transfected with plasmids required for production of AAV, (i.e., AAV rep/cap construct, an adenoviral helper construct, and/or ITR flanked payload construct). In certain embodiments, the transfection process can comprise optional medium changes (e.g. medium changes for cells in adhesion form, no medium changes for cells in suspension form, medium changes for cells in suspension form if desired). In certain embodiments, the transfection process can comprise transfection mediums such as DMEM or F17. In certain embodiments, the transfection medium can comprise serum or can be scrum-free (e.g. cells in adhesion state with calcium phosphate and with serum, cells in suspension state with PEI and without serum).

[0490] Cells can subsequently be collected by scraping (adherent form) and/or pelleting (suspension form and scraped adherent form) and transferred into a receptacle. Collection steps can be repeated as necessary for full collection of produced cells. Next, cell lysis can be achieved by consecutive freeze-thaw cycles (−80C to 37C), chemical lysis (such as adding detergent triton), mechanical lysis, or by allowing the cell culture to degrade after reaching ˜0% viability. Cellular debris is removed by centrifugation and/or depth filtration. The samples are quantified for AAV particles by DNase resistant genome titration by DNA qPCR.

[0491] AAV particle titers are measured according to genome copy number (genome particles per milliliter). Genome particle concentrations are based on DNA qPCR of the vector DNA as previously reported (Clark et al. (1999) Hum. Gene Ther., 10:1031-1039: Veldwijk et al. (2002) Mol. Ther., 6:272-278, the contents of which are each incorporated herein by reference in their entireties as related to the measurement of particle concentrations, insofar as they do not conflict with the present disclosure)

### Insect Cells

[0492] Viral production of the present disclosure comprises processes and methods for producing AAV particles or viral vectors that contact a target cell to deliver a payload construct, e.g. a recombinant viral construct, which comprises a nucleotide encoding a payload molecule. In certain embodiments, the AAV particles or viral vectors of the present disclosure may be produced in a viral production cell that comprises an insect cell.

[0493] Growing conditions for insect cells in culture, and production of heterologous products in insect cells in culture are well-known in the art, see U.S. Pat. No. 6,204,059, the content of which is incorporated herein by reference in its entirety as related to the growth and use of insect cells in viral production, insofar as it does not conflict with the present disclosure.

[0494] Any insect cell which allows for replication of parvovirus and which can he maintained in culture can be used in accordance with the present disclosure. AAV viral production cells commonly used for production of recombinant AAV particles comprise, but is not limited to, Spodoptera frugiperda, comprising, but not limited to the Sf9 or Sf21 cell lines, Drosophila cell lines, or mosquito cell lines, such as Aedes albopictus derived cell lines. Use of insect cells for expression of heterologous proteins is well documented, as are methods of introducing nucleic acids, such as vectors, e.g., insect-cell compatible vectors, into such cells and methods of maintaining such cells in culture. See, for example, Methods in Molecular Biology, ed. Richard, Humana Press, NJ (1995); O′Reilly et al., Baculovirus Expression Vectors, A Laboratory Manual, Oxford Univ. Press (1994); Satnulski et al., J. Vir.63:3822-8 (1989); Kajigaya et al., Proc. Nat'l. Acad. Sci. USA 88: 4646-50 (1991); Ruffin et al., J. Vir. 66:6922-30 (1992); Kimbauer et al ., Vir.21.9:37-44 (1996); Zhao et al., Vir.272:382-93 (2000); and Samulski et al., U.S. Pat. No. 6,204,059, the contents of which are each incorporated herein by reference in their entireties as related to the use of insect cells in viral production, insofar as they do not conflict with the present disclosure.

[0495] In one embodiment, the AAV particles are made using the methods described in WO2015/191508, the content of which is incorporated herein by reference in its entirety, insofar as it does not conflict with the present disclosure.

[0496] In certain embodiments, insect host cell systems, in combination with baculoviral systems (e.g., as described by Luckow et al., Bio/Technology 6: 47 (1988)) may be used. In certain embodiments, an expression system for preparing chimeric peptide is Trichoplusia ni, Tn 5B1-4 insect cells/ baculoviral system, which can be used for high levels of proteins, as described in U.S. Pat. No. 6,660,521, the content of which is incorporated herein by reference in its entirety, insofar as it does not conflict with the present disclosure.

[0497] Expansion, culturing, transfection, infection and storage of insect cells can be carried out in any cell culture media, cell transfection media or storage media known in the art, comprising Hyclone SFX Insect Cell Culture Media, Expression System ESF AF Insect Cell Culture Mediwn, Basal IPL-41 Insect Cell Culture Media, ThermoFisher Sf90011 media, ThermoFisher Sf900III media, or ThermoFisher Grace's Insect Media. Insect cell mixtures of the present disclosure can also comprise any of the formulation additives or elements described in the present disclosure, comprising (but not limited to) salts, acids, bases, buffers, surfactants (such as Poloxatner 188/Pluronic. F-68), and other known culture media elements. Formulation additives can be incorporated gradually or as “spikes” (incorporation of large volumes in a short time).

### Baculovirus-Production Systems

[0498] In certain embodiments, processes of the present disclosure can comprise production of AAV particles or viral vectors in a baculoviral system using a viral expression construct and a payload construct vector. In certain embodiments, the baculoviral system comprises Baculovirus expression vectors (BEVs) and/or baculovirus infected insect cells (BIICs). In certain embodiments, a viral expression construct or a payload construct of the present disclosure can be a bacmid, also known as a baculovirus plasmid or recombinant baculovirus genome. In certain embodiments, a viral expression construct or a payload construct of the present disclosure can be polynucleotide incorporated by homologous recombination (transposon donor/acceptor system) into a bacmid by standard molecular biology techniques known and performed by a person skilled in the art. Transfection of separate viral replication cell populations produces two or more groups (e.g. two, three) of baculoviruses (BEVs), one or more group which can comprise the viral expression construct (Expression BEV), and one or more group which can comprise the payload construct (Payload BEV). The baculoviruses may be used to infect a viral production cell for production of AAV particles or viral vector.

[0499] In certain embodiments, the process comprises transfection of a single viral replication cell population to produce a single baculovirus (BEV) group which comprises both the viral expression construct and the payload construct. These baculoviruses may be used to infect a viral production cell for production of AAV particles or viral vector.

[0500] In certain embodiments, BEVs are produced using a Bacmid Transfection agent, such as Promega FuGENE HD, WFI water, or Thermaisher Cellfectin II Reagent. In certain embodiments, BEVs are produced and expanded in viral production cells, such as an insect cell.

[0501] In certain embodiments, the method utilizes seed cultures of viral production cells that comprise one or more BEVs, comprising baculovirus infected insect cells (BIICs). The seed BIICs have been transfected/transduced/infected with an Expression BEV which comprises a viral expression construct, and also a Payload BEV which comprises a payload construct. In certain embodiments, the seed cultures are harvested, divided into aliquots and frozen, and may be used at a later time to initiate transfection/transduction/infection of a naïve population of production cells. In certain embodiments, a bank of seed BIICs is stored at −80° C. or in LN₂ vapor.

[0502] Baculoviruses are made of several essential proteins which are essential for the function and replication of the Baculovirus, such as replication proteins, envelope proteins and capsid proteins, The Baculovirus genome thus comprises several essential-gene nucleotide sequences encoding the essential proteins. As a non-limiting example, the genome can comprise an essential-gene region which comprises an essential-gene nucleotide sequence encoding an essential protein for the Baculovirus construct. The essential protein can comprise: GP64 baculovirus envelope protein, VP39 baculovirus capsid protein, or other similar essential proteins for the Baculovirus construct.

[0503] Baculovirus expression vectors (BEV) for producing AAV particles in insect cells, comprising but not limited to Spodoptera frugiperda (SD) cells, provide high titers of viral vector product. Recombinant baculovirus encoding the viral expression construct and payload. construct initiates a productive infection of viral vector replicating cells. Infectious baculovirus particles released from the primary infection secondarily infect additional cells in the culture, exponentially infecting the entire cell culture population in a number of infection cycles that is a function of the initial multiplicity of infection, see Urabe, M. et al. J Virol. 2006 February; 80(4):1874-85, the content of which is incorporated herein by reference in its entirety as related to the production and use of BEVs and viral particles, insofar as it does not conflict with the present disclosure.

[0504] Production of AAV particles with baculovirus in an insect cell system may address known baculovirus genetic and physical instability.

[0505] In certain embodiments, the production system of the present disclosure addresses baculovirus instability over multiple passages by utilizing a titerless infected-cells preservation and scale-up system. Small scale seed cultures of viral producing cells are ⁻transfected with viral expression constructs encoding the structural and/or non-structural components of the AAV particles. Baculovirus-infected viral producing cells are harvested into aliquots that may be cryopreserved in liquid nitrogen; the aliquots retain viability and infectivity for infection of large scale viral producing cell culture Wasilko D J et al. Protein Expr Purif. 2009 June; 65(2):122-32, the content of which is incorporated herein by reference in its entirety as related to the production and use of BEVs and viral particles, insofar as it does not conflict with the present disclosure.

[0506] A genetically stable baculovirus may be used to produce a source of the one or more of the components for producing AAV particles in invertebrate cells. In certain embodiments, defective baculovirus expression vectors may be maintained episomally in insect cells. In such an embodiment the corresponding bacmid vector is engineered with replication control elements, comprising but not limited to promoters, enhancers, and/or cell-cycle regulated replication elements.

[0507] In certain embodiments, baculoviruses may be engineered with a marker for recombination into the chitinase/cathepsin locus. The chia/v-cath locus is non-essential for propagating baculovirus in tissue culture, and the V-cath (EC 3.4.22.50) is a cysteine endoprotease that is most active on Arg-Arg dipeptide containing substrates. The Arg-Arg dipeptide is present in densovirus and parvovirus capsid structural proteins but infrequently occurs in dependovirus VP1.

[0508] In certain embodiments, stable viral producing cells permissive for baculovirus infection are engineered with at least one stable integrated copy of any of the elements necessary for AAV replication and vector production comprising, but not limited to, the entire AAV genome, Rep and Cap genes, Rep genes, Cap genes, each Rep protein as a separate transcription cassette, each VP protein as a separate transcription cassette, the AAP (assembly activation protein), or at least one of the baculovirus helper genes with native or non-native promoters.

[0509] In certain embodiments, the Baculovirus expression vectors (BEV) are based on the AcMNPV baculovirus or BmNPV baculovirus BmNPV. In certain embodiments, a bacmid of the present disclosure is based on (i.e. engineered variant of) an AcMNPV bacmid such as bmon14272, vAce25ko or vAclef11KO.

[0510] In certain embodiments, the Baculovirus expression vectors (BEV) is a BEV in which the baculoviral v-cat/i gene has been partially or fully deleted (“v-cath deleted BEV”) or mutated. In certain embodiments, the BEVs lack the v-cath gene or comprise a mutationally inactivated version of the v-cath gene. In certain embodiments, the BEVs lack the v-cath gene. In certain embodiments, the BEVs comprise a mutationally inactivated version of the v-cath gene.

[0511] Viral production bacmids of the present disclosure can comprise deletion of certain baculoviral genes or loci.

[0512] The baculovirus/Sf9 system is a cGMP compatible and scalable manufacturing platform established for rAAV production. Baculoviral inoculum is a critical raw material for this manufacturing process and can have a significant impact on process yields and product quality. However, as with any other biological-based production processes, there is a large potential for batch-to-batch variability in the production of baculoviral inoculum. Each hank baculoviral inoculum requires extensive analytical characterization and optimized bioreactor production parameters to be used optimally in rAAV production (which adds time and cost for large-scale manufacturing). It is therefore advantageous to produce large banks of baculoviral inoculum, as these large banks allow for consistent and repeatable production of rAAV in large-scale bioreactors across multiple manufacturing campaigns from the same baculoviral inoculum bank.

[0513] In certain embodiments, baculoviral inoculum banks can be produced using small-scale shake flasks, such as 3L or 5L shake flasks. However, this process is generally limited in the maximum cell density of the BIIC cells which can be produced, and thus requires centrifugation to concentrate resulting cells into a workable concentration. This correspondingly limits the volume (i.e. quantity) of the baculoviral inoculum bank (˜600 mL) which can be produced and stored using this method. This process also presents sterility concerns due to open operation.

[0514] In certain embodiments, baculoviral inoculum banks can be produced using bioreactors, such as 20-50 L bioreactors. However, this process is also generally limited in the maximum cell density of the BIIC cells which can be produced, and thus requires significant processing through Tangential Flow Filtration (TFF) and/or centrifugation to concentrate resulting cells into a workable concentration (with 3 L of culture material being required to produce about 600 mL of concentrated BIIC formulation, corresponding with a 15-25% yield). This correspondingly limits the volume (i.e. quantity) of the baculoviral inoculum bank (˜3000 mL) which can be produced and stored using this method. This process also presents sterility concerns due to open operation.

[0515] In certain embodiments, perfusion technology can be used in the production of baculoviral inoculum banks. Perfusion systems are fluid circulation systems which use combinations of pumps, filters and screens to retain cells inside a bioreactor while continually removing cell waste products and replacing media depleted of nutrients by cell metabolism. In certain embodiments, the perfusion system is an alternating tangential flow (ATF) perfusion system. in certain embodiments, a perfusion system can be used in coordination with bioreactors to manage and cycle cell culture media within a bioreactor during the production of Baculovirus Infected Insect Cells (BACs). In certain embodiments, a perfusion system can be used to support the production of high quality BIIC banks having an unexpectedly high cell density at large-scale. In certain embodiments, a perfusion system can be used to provide an infection-cell-to-product-cell yield of greater than 70% (e.g. 75-80%, 80-85%, 85-90%, 90-95% or 95-100%). In certain embodiments, a perfusion system can be used to perform a media switch within the bioreactor, such as the replacements of a cell culture media with a cryopreservation media which allows for BIIC cells to be frozen and preserved.

[0516] The present disclosure presents methods for producing a baculovirus infected insect cell (BIIC). In certain embodiments, the present disclosure presents methods for producing a baculovirus infected insect cell (BIIC) which comprises the following steps: (a) introducing a volume of cell culture medium into a bioreactor; (b) introducing at least one viral production cell (VPC) into the bioreactor and expanding the number of VPCs in the bioreactor to a target VPC cell density; (c) introduction at least one Baculoviral Expression Vector (BEV) into the bioreactor, wherein the BEV comprises an AAV viral expression construct or an AAV payload construct; (d) incubating the mixture of VPCs and BEVs in the bioreactor under conditions which allow at least one BEV to infect at least one NIPC to produce a baculoviras infected insect cell (BIIC); (e) incubating the bioreactor under conditions which allow the number of BIICs in the bioreactor to reach a target BIIC cell density; and (f) harvesting the BIICs from the bioreactor. In certain embodiments, the bioreactor has a volume of at least 5 L, 10 L, 20 L, 50 L, 100 L, or 200 L. In certain embodiments, the volume of cell culture medium (i.e. working volume) in the bioreactor is at least 5 L, 10 L, 20 L, 50 L, 100 L, or 200 L.

[0517] In certain embodiments, the NIPC density at BEV introduction is 1.0×10⁵-2.5×10⁵, 2.5×10⁵-5.0×10⁵, 5.0×10⁵-7.5×10⁵, 7.5×10⁵-1.0×10⁶, 1.0×10⁶-5.0×10⁶, 1.0×10⁶-2.0×10⁶, 1.5×10⁶-2.5×10⁶, 2.0×10⁶-3.0×10⁶, 2.5×10⁶-3.5×10⁶, 3.0×10⁶-4.0×10⁶, 3.5×10⁶-4.5×10⁶, 4.0×10⁶-5.0×10⁶, 4.5×10⁶-5.5×10⁶, 5.0×10⁶-1.0×10⁷, 5.0×10⁶-6.0×10⁶, 5.5×10⁶-6.5×10⁶, 6.0×10⁶-7.0×10⁶, 6.5×10⁶-7.5×10⁶, 7.0×10⁶-8.0×10⁶, 7.5×10⁶-8.5×10⁶, 8.0×10⁶-9.0×10⁶, 8.5×10⁶-9.5×10⁶, 9.0×10⁶-1.0×10⁷, 9.5×10⁶-1.5×10⁷, 1.0×10⁷-5.0×10⁷, or 5.0×10⁷-1.0×10⁸ cells/mL. In certain embodiments, the VPC density at BEV introduction is 5.0×10⁵, 6.0×10⁵, 7.0×10⁵, 8.0×10⁵, 9.0×10⁵, 1.0×10⁶, 1.5×10⁶, 2.0×10⁶, 2.5×10⁶, 3.0×10⁶, 3.5×10⁶, 4.0×10⁶, 4.5×10⁶, 5.0×10⁶, 5.5×10⁶, 6.0×10⁶, 6.5×10⁶, 7.0×10⁶, 7.5×10⁶, 8.0×10⁶, 8.5×10⁶, 9.0×10⁶, 9.5×10⁶, 1.0×10⁷, 1.5×10⁷, 2.0×10⁷, 2.5×10⁷, 3.0×10⁷, 4.0×10⁷, 5.0×10⁷, 6.0×10⁷, 7.0×10⁷, 8.0×10⁷, or 9.0×10⁷ cells/mL.

[0518] In certain embodiments, the target VPC cell density at BEV introduction is 1.5-4.0×10⁶ cells/mL. In certain embodiments, the target VPC cell density at BEV introduction is 2.0-3.5×10⁶ cells/mL.

[0519] In certain embodiments, the BE\/s are introduced into the bioreactor at a target Multiplicity of Infection (M01) of BEVs to VPCs. In certain embodiments, the BEV MIN is 0.0005-0.003, or more specifically 0.001-0.002.

[0520] In certain embodiments, the bioreactor can comprise a perfusion :stem for managing the cell culture medium within the bioreactor. in certain embodiments, the perfusion system is an alternating tangential flow (ATF) perfusion system. In certain embodiments, the perfusion system replaces at least a portion of the culture medium in the bioreactor while retaining at least 90% of the VPCs and FMCS within the bioreactor. In certain embodiments, the perfusion system removes cell waste products from the cell culture medium within the bioreactor. In certain embodiments, the perfusion system replaces cell culture media which has been depleted of nutrients by cellular metabolism. In certain embodiments, the perfusion system replaces the cell culture media with a cryopreservation media which allows for BIIC cells to be frozen and preserved. In certain embodiments, the perfusion system replaces the cell culture media with a cell culture media supplemented with growth or production boosting factors to increase the quality and quantity of the AAV product.

[0521] In certain embodiments, the BIICs are harvested from the bioreactor at a specific BIIC cell density. In certain embodiments, the BIICs harvested from the bioreactor have a specific BIIC cell density. In certain embodiments, the BIIC cell density at harvesting is 6.0-18.0×10⁶ cells/mL, 8.0-16.5×10⁶ cells/mL, 10.0-16.5×cells/mL.

### Other

[0522] In certain embodiments expression hosts comprise, but are not limited to, bacterial species within the genera Escherichia, Bacillus, Pseudomonas, or Salmonella.

[0523] In certain embodiments, a host cell which comprises AAV rep and cap genes stably integrated within the cell's chromosomes, may be used for AAV particle production. In a non-limiting example, a host cell which has stably integrated in its chromosome at least two copies of an AAV rep gene and AAV cap gene may he used to produce the AAV particle according to the methods and constructs described in U.S. Pat. No. 7,238,526, the content of which is incorporated herein by reference in its entirety as related to the production of viral particles, insofar as it does not conflict with the present disclosure.

[0524] In certain embodiments, the AAV particle can be produced in a host cell stably transformed with a molecule comprising the nucleic acid sequences which permit the regulated expression of a rare restriction enzyme in the host cell, as described in U.S. Pat. No. 20030092161. and EP1183380, the contents of which are each incorporated herein by reference in their entireties as related to the production of viral particles, insofar as they do not conflict with the present disclosure.

[0525] In certain embodiments, production methods and cell lines to produce the AAV particle may comprise, but are not limited to those taught in PCT/US1996/010245, PCT/US1997/015716, PCT/US1997/015691, PCT/US1998/019479, PCT/US1998/019463, PCT/US2000/000415, PCT/US2000/040872, PCT/US2004/01.6614, PCT/US2007/010055, PCT/US1999/005870, PCT/US2000/004755, US Patent Application Nos. US08/549489, US08/462014, US09/659203, US10/246447, US10/465302, U.S. Pat. Nos. 6,281,010, 6,270,996, 6,261,551, 5,756,283 (Assigned to NIH), U.S. Pat. Nos. 6,428,988, 6,274,354, 6,943,019, 6,482,634, (Assigned to NUM U.S. Pat. Nos. 7,238,526, 6,475,769), U.S. Pat. No. 6,365,394 (Assigned to NIH), U.S. Pat. Nos. 7,491,508, 7,291,498, 7,022,519, 6,485,966, 6,953,690, 6,258,595, EP2018421, EP1064393, EP1163354, EP835321, EP931158, EP950111, EP1015619, EP1183380, EP2018421, EP1226264, EP1636370, EP1163354, EP1064393, US20030032613, US20020102714, US20030073232, US20030040101 (Assigned to US20060003451, US20020090717, US20030092161, US20070231303, US20060211115, US20090275107, US2007004042, US20030119191, US20020019050, the contents of which are each incorporated herein by reference in their nireties, insofar as they do not conflict with the present disclosure.

### Viral Production Systems

### Large-Scale Production

[0526] In certain embodiments, AAV particle production may be modified to increase the scale of production. Large scale viral production methods according to the present disclosure may comprise any of the processes or processing steps taught in U.S. Pat. Nos. 5,756,283, 6,258,595, 6,261,551, 6,270,996, 6,281,010, 6,365,394, 6,475,769, 6,482,634, 6,485,966, 6,943,019, 6,953,690, 7,022,519, 7,238,526, 7,291,498 and 7,491,508 or International Publication Nos. WO1996039530, WO1998010088, WO1999014354, WO1999015685, WO1999047691, WO2000055342, WO2000075353 and WO2001023597, the contents of each of which are herein incorporated by reference by reference in their entirety.

[0527] Methods of increasing AAV particle production scale typically comprise increasing the number of viral production cells. In certain embodiments, viral production cells comprise adherent cells. To increase the scale of AAV particle production by adherent viral production cells, larger cell culture surfaces are required. In certain embodiments, large-scale production methods comprise the use of roller bottles to increase cell culture surfaces, Other cell culture substrates with increased surface areas are known in the art. Examples of additional adherent cell culture products with increased surface areas comprise, but are not limited to iCELLis (Pall Corp, Port Washington, N.Y.), CELLSTACK®, CULCUBE® (Corning Corp., Corning, N.Y.) and NUNC™ CELL FACTORY™ (Thermo Scientific, Waltham, Mass.) In certain embodiments, large-scale adherent cell surfaces may comprise from about 1,000 cm² to about 100,000 cm².

[0528] In certain embodiments, large-scale viral production methods of the present disclosure may comprise the use of suspension cell cultures. Suspension cell culture can allow for significantly increased numbers of cells. Typically, the number of adherent cells that can be grown on about 10-50 cm² of surface area can be grown in about 1 cm³ volume in suspension.

[0529] In certain embodiments, large-scale cell cultures may comprise from about 10⁷ to about 10⁹ cells, from about 10⁸ to about 10¹⁰ cells, from about 10⁹ to about 10¹² cells or at least 10¹² cells. In certain embodiments, large-scale cultures may produce from about 10⁹ to about 10¹², from about 10¹⁶ to about 10¹³, from about 10¹¹ to about 10¹⁴, from about 10¹² to about 10¹⁵ or at least 10¹⁵ AAV particles.

[0530] Transfection of replication cells in large-scale culture formats may be carried out according to any methods known in the art. For large-scale adherent cell cultures, transfection methods may comprise, but are not limited to the use of inorganic compounds (e.g. calcium phosphate,) organic compounds (e.g. polyethyleneimine (PEI)) or the use of non-chemical methods (e.g. electroporation). With cells grown in suspension, transfection methods may comprise, but are not limited to the use of inorganic compounds (e.g., calcium phosphate,) organic compounds (e.g. polyethyleneimine (PEI)) or the use of non-chemical methods (e.g. electroporation). In certain embodiments, transfection of large-scale suspension cultures may be carried out according to the section entitled “Transfection Procedure” described in Feng, L. et al,, 2008. Biotechnol Appl Biochem. 50:121-32, the contents of which are herein incorporated by reference in their entirety. According to such embodiments. PEI-DNA complexes may be formed for introduction of plasmids to be transfected. In certain embodiments, cells being transfected with PEI-DNA complexes may be ‘shocked’ prior to transfection. This comprises lowering cell culture temperatures to 4° C. for a period of about I hour. In certain embodiments, cell cultures may be shocked for a period of from about 10 minutes to about 5 hours. In certain embodiments, cell cultures may be shocked at a temperature of from about 0° C. to about 20° C.

[0531] In certain embodiments, transfections may comprise one or more vectors for expression of an RNA effector molecule to reduce expression of nucleic acids from one or more payload construct. Such methods may enhance the production of AAV particles by reducing cellular resources wasted on expressing payload constructs. In certain embodiments, such methods may be carried according to those taught in US Publication No. US2014/0099666, the contents of which are herein incorporated by reference in their entirety.

### Bioreactors

[0532] In certain embodiments, cell culture bioreactors may be used for large scale production of AAV particles. In certain embodiments, bioreactors comprise stirred tank reactors. Such reactors generally comprise a vessel, typically cylindrical in shape, with a stirrer impeller.) in certain embodiments, such bioreactor vessels may be placed within a water jacket to control vessel temperature and/or to minimize effects from ambient temperature changes.

[0533] Bioreactor vessel volume may range in size from about 500 ml to about 2 L, from about 1 L to about 5 L, from about 2.5 L to about 20 L, from about 10 L to about 50 L, from about 25 L to about 100 L, from about 75 L to about 500 L, from about 250 L to about 2,000 L, from about 1,000 L to about 10,000 L, from about 5,000 L to about 50,000 L or at least 50,000 L. Vessel bottoms may be rounded or flat. In certain embodiments, animal cell cultures may be maintained in bioreactors with rounded vessel bottoms.

[0534] In certain embodiments, bioreactor vessels may be warmed through the use of a thermocirculator. Thermocirculators pump heated water around water jackets. In certain embodiments, heated water may be pumped through pipes (e.g. coiled pipes) that are present within bioreactor vessels. In certain embodiments, warm air may be circulated around bioreactors, comprising, but not limited to air space directly above culture medium. Additionally, pH and CO₂ levels may be maintained to optimize cell viability.

[0535] In certain embodiments, bioreactors may comprise hollow-fiber reactors. Hollow-fiber bioreactors may support the culture of both anchorage dependent and anchorage independent cells. Further bioreactors may comprise, but are not limited to, packed-bed or fixed-bed bioreactors. Such bioreactors may comprise vessels with glass beads for adherent cell attachment. Further packed-bed reactors may comprise ceramic beads.

[0536] In certain embodiments, viral particles are produced through the use of a disposable bioreactor. In certain embodiments, bioreactors may comprise GE WAVE bioreactor, a GE Xcellerax Bioreactor, a Sartorius Biostat Bioreactor, a ThermoFisher Hyclone Bioreactor, or a Pall Allegro Bioreactor.

[0537] In certain embodiments, AAV particle production in cell bioreactor cultures may be carried out according to the methods or systems taught in U.S. Pat. Nos. 5,064764, 6,194,191, 6,566,118, 8,137,948 or US Patent Application No. US2011/0229971, the contents of each of which are herein incorporated by reference in their entirety.

[0538] In certain embodiments, perfusion technology can be used in the production of viral particles. Perfusion systems are fluid circulation systems which use filters and screens to retain cells inside a bioreactor while continually removing cell waste products and media depleted of nutrients by cell metabolism. In certain embodiments, the perfusion system is an alternating tangential flow (ATF) perfusion system. In certain embodiments, a perfusion system can be used in coordination with bioreactors to manage and cycle cell culture media within a bioreactor during the production of viral particles, such as AAV viral particles. In certain embodiments, a perfusion system can be used to support the production of high quality AAV viral particles having an unexpectedly high cell density at large-scale. In certain embodiments, a perfusion system can be used to perform a media switch within the bioreactor, such as the replacement of a cell culture media with media supplemented with growth or production boosting; factors to increase the quality and quantity of the AAV product.

[0539] It is advantageous to produce large batches of AAV particles in single production campaigns for gene therapy clinical development activities, as the large batches of therapeutic materials ensure clinical study consistency and minimize the therapeutic and statistical variability resulting from multiple smaller manufacturing campaigns. It is advantageous to produce large batches of AAV particles in single production campaigns for commercial product development activities, as the large batches of therapeutic materials minimize the variability resulting from multiple smaller manufacturing campaigns and corresponding complications in quality control and product analysis associated with small-batch production.

### Expansion of Viral Production Cell (VPC) Mixtures

[0540] In certain embodiments, an AAV particle or viral vector of the present disclosure may be produced in a viral production cell (VPC), such as an insect cell. Production cells can be sourced from a Cell Bank (CB) and are often stored in frozen cell banks.

[0541] In certain embodiments, a viral production cell from a Cell Bank is provided in frozen form. The vial of frozen cells is thawed, typically until ice crystal dissipate. In certain embodiments, the frozen cells are thawed at a temperature between 10-50° C., 15-40° C., 20-30° C., 25-50° C., 30-45° C., 35-40° C., or 37-39° C. In certain embodiments, the frozen viral production cells are thawed using a heated water bath.

[0542] In certain embodiments, a thawed CB cell mixture will have a cell density of 1.0×10⁴-1.0×10⁹ cells/mL. In certain embodiments, the thawed CB cell mixture has a cell density of 1.0×10⁴-2.5×10⁴ cells/mL, 2.5×10⁴-5.0×10⁴ cells/int, 5.0×10⁴-7.5×10⁴ cells/mL, 7.5×10⁴-1.0×10⁵ cell s/mL, 1.0×10⁵-2.5×10⁵ cells/mL, 2.5×10⁵-5.0×10⁵ cells/int, 5.0×10⁵-7.5×10⁵ cells/mL. 7.5×10⁵-1.0×10⁶ cells/mL, 1.0×10⁶-2.5×10⁶ cells/mL, 2.5×10⁶-5.0×10⁶ cells/mL, 5.0×10⁶-7.5×10⁶ cells/int, 7.5×10⁶-1.0×10⁷ cells/mL, 1.0×10⁷-2.5×10⁷ cells/mL, 2.5×10⁷-5.0×10⁷ cells/mL, 5.0×10⁷-7.5×10⁷ cells/mL, 7.5×10⁷-1.0×10⁸ 1.0×10⁸-2.5×10⁸ cells/mL, 2.5×10⁸-5.0×10⁸ cells/mL, 5.0×10⁸-7.5×10⁸ cells/mL, or 7.5×10⁸-1.0×10⁹ cells/mL.

[0543] In certain embodiments, the volume of the CB cell mixture is expanded. This process is commonly referred to as a Seed Train, Seed Expansion, or CB Cellular Expansion. Cellular/Seed expansion can comprise successive steps of seeding and expanding a cell mixture through multiple expansion steps using successively larger working volumes. In certain embodiments, cellular expansion can comprise one, two, three, four, five, six, seven, or more than seven expansion steps. In certain embodiments, the working volume in the cellular expansion can comprise one or more of the following working volumes or working volume ranges: 5 mL, 10 mL, 20 mL, 5-20 mL, 25 mL, 30 mL, 40 mL, 50 mL, 20-50 mL, 75 mL, 100 mL, 125 mL, 150 mL, 175 mL, 200 mL, 50-200 mL, 250 mL, 300 mL, 400 mL, 500 mL, 750 mL, 1000 mL, 250-1000 mL, 1250 mL, 1500 mL, 1750 mL, 2000 mL, 1000-2000 mL, 2250 mL, 2500 mL, 2750 mL, 3000 mL, 2000-3000 mL, 3500 mL, 4000 mL, 4500 mL, 5000 mL, 3000-5000 mL, 5.5 L, 6.0 L, 7.0 L, 8.0 L, 9.0 L. 10.0 L, and 5.0-10.0 L.

[0544] In certain embodiments, a volume of cells from a first expanded cell mixture can be used to seed a second, separate Seed Train/Seed Expansion (instead of using thawed CB cell mixture). This process is commonly referred to as rolling inoculum. In certain embodiments, rolling inoculum is used in a series of two or more (e.g. two, three, four or five)separate Seed Trains/Seed Expansions.

[0545] In certain embodiments, large-volume cellular expansion can comprise the use of a bioreactor, such as a GE WAVE bioreactor, a GE Xcellerax Bioreactor, a Sartorius Biostat Bioreactor, a ThermoFisher Hyclone Bioreactor, or a Pall Allegro Bioreactor.

[0546] In certain embodiments, the cell density within a working volume is expanded to a target output cell density. In certain embodiments, the output cell density of an expansion step is 1.0×10⁵-5.0×10⁵, 5.0×10⁵-1.0×1.0⁶, 1.0×10⁶-5.0×10⁶, 5.0×10⁶-1.0×10⁷, 1.0×10⁷-5.0×10⁷, 5.0×10⁷-1.0×10⁸, 5.0×10⁵, 6.0×10⁵, 7.0×10⁵, 8.0×10⁵, 9.0×10⁵, 1.0×10⁶, 2.0×10⁶, 3.0×10⁶, 4.0×10⁶, 5.0×10⁶, 6.0×10⁶, 7.0×10⁶, 8.0×10⁶, 9.0×10⁶, 1.0×10⁷, 2.0×10.0×10⁷, 4.0×10⁷, 5.0×10⁷, 6.0×10⁷, 7.0×10⁷, 8.0×10⁷, or 9.0×10⁷ cells/mL.

[0547] In certain embodiments, the output cell density of a working volume provides a seeding cell density for a larger, successive working volume. In certain embodiments, the seeding cell density of an expansion step is 1.0×10⁵-5.0×10⁵, 5.0×10⁵-10×10⁶, 1.0×10⁶-5.0×10⁶, 5.0×10⁶-1.0×10⁷, 1.0×10⁷-5.0×10⁷, 5.0×10⁷-1.0×10⁸, 5.0×10¹¹ , 6.0×10⁵, 7.0×10⁵, 8.0×10⁵, 9.0×10⁵, 1.0×10⁶, 2.0×10⁶, 3.0×10⁶, 4.0×10⁶, 5.0×10⁶, 6.0×10⁶, 7.0×10⁶, 8.0×10⁶, 9.0×10⁶, 1.0×10⁷, 2.0×10⁷, 3.0×10⁷, 4.0×10⁷, 5.0×10⁷, 6.0×10⁷, 7.0×10⁷, 8.0×10⁷, or 9.0×10⁷ cells/mL.

[0548] In certain embodiments, cellular expansion can last for 1-50 days. Each cellular expansion step or the total cellular expansion can last for 1-10 days, 1-5 days, 1-3 days, 2-3 days, 2-4 days, 2-5 days, 2-6 days, 3-4 days, 3-5 days, 3-6 days, 3-8 days, 4-5 days, 4-6 days, 4-8 days, 5-6 days, or 5-8 days. In certain embodiments, each cellular expansion step or the total cellular expansion can last for 1-100 generations, 1-1000 generations, 100-1000 generation, 100 generations or more, or 1000 generation or more.

[0549] In certain embodiments, infected or transfected production cells can be expanded in the same manner as CB cell mixtures, as set forth in the present disclosure.

### Infection of Viral Production Cells

[0550] In certain embodiments. AAV particles of the present disclosure are produced in a viral production cell (VPC), such as an insect cell, by infecting the VPC with a viral vector which comprises an AAV expression construct and/or a viral vector which comprises an AAV payload construct. In certain embodiments, the VPC is infected with an Expression BEV, which comprises an AAV expression construct and a Payload BEV which comprises an AAV payload construct.

[0551] In certain embodiments, AAV particles are produced by infecting a VPC with a viral vector which comprises both an AAV expression construct and an AAV payload construct. In certain embodiments, the VPC is infected with a single BEV which comprises both an AAV expression construct and an AAV payload construct.

[0552] In certain embodiments, VPCs (such as insect cells) are infected using Infection BIICs in an infection process which comprises the following steps: (i) A collection of VPCs are seeded into a Production Bioreactor; (ii) The seeded VPCs can optionally be expanded to a target working volume and cell density; (iii) Infection BIICs which comprise Expression BEVs and Infection BIICs which comprise Payload BEVs are injected into the Production Bioreactor, resulting in infected viral production cells; and (iv) incubation of the infected viral production cells to produce AAV particles within the viral production cells.

[0553] In certain embodiments, the VPC density at infection is 1.0×10⁵-2.5×10⁵, 2.5×10⁵-5.0×10⁵, 5.0×1.0⁵-7.5×10⁵, 7.5×1.0⁵-1.0×10⁶, 1.0×1.0⁶-5.0×10⁶, 1.0×1.0⁶-2.0×10⁶, 2.5×10⁶, 2.0×10⁶-3.0×10⁶, 2.5×10⁶-3.5×10⁶, 3.0×10⁶-3.4×10⁶, 3.0×10⁶-4.0×10⁶, 3.5×10⁶-4.5×10⁶, 4.0×10⁶-5.0×10⁶, 4.5×10⁶-5.5×10⁶, 5.0×10⁶-1.0×10⁷, 5.0×10⁶-6.0×10⁶, 5.5×10⁶-6.5×10⁶, 6.0×10⁶-7.0×10⁶, 6.5×10⁶-7.5×10⁶, 7.0×10⁶-8.0×10⁶, 7.5×10⁶-8.5×10⁶, 8.0×10⁶-9.0×10⁶, 8.5×10⁶-9.5×10⁶, 9.0×10⁶-1.0×1.0⁷, 9.5×10° -1.5×1.0⁷, 1.0×10⁷-5.0×10⁷, or 5.0×10⁷-1.0×10⁸ cells/mL. In certain embodiments, the VPC density at infection is 5.0×10⁵, 6.0×10⁵, 7.0×10⁵, 8.0×10⁵, 9.0×10⁵, 1.0×10⁶, 1.5×10⁶, 2.0×10⁶, 2.5×10⁶, 3.0×10⁶, 3.1×10⁶, 3.2×10⁶, 3.3×10⁶, 3.4×10⁶, 3.5×10⁶, 4.0×10⁶, 4.5×10⁶, 5.0×10⁶, 5.5×10⁶, 6.0×10⁶, 6.5×10⁶, 7.0×10⁶, 7.5×10⁶, 8.0×10⁶, 8.5×10⁶, 9.0×10⁶, 9.5×10⁶, 1.5×10⁷, 2.0×10⁷, 2.5×10⁷, 3.0×10⁷, 4.0×10⁷, 5.0×10⁷, 6.0×10⁷, 7.0×10⁷, 8.0×10⁷, or 9.0×10⁷ cells/mL. In certain embodiments, the VPC density at infection is 2.0-3.5×10⁶ cells/mt. In certain embodiments, the VPC density at infection is 3.5-5.0×10⁶ cells/mL. In certain embodiments, the VPC density at infection is 5.0-7.5×10⁶ cells/mL. In certain embodiments, the VPC density at infection is 5.0-10.0×10⁶ cells/mL.

[0554] FIG. 5A, FIG. 5B, FIG. 6A and. FIG. 6B show that a VPC density at transfection/infection of between 3.0-3.4×10⁶ cells/mL, particularly 3.2×10⁶ cells/mL, combined with a VPC-to-BIIC^{Rep/Cap} ratio of about 1:300K v/v, provides favorable AAV titer (vg/mL) and Capsid Full %.

[0555] In certain embodiments, Infection BIICs are combined with the VPCs in target ratios of VPC-to-BIIC. In certain embodiments, the VPC-to-BIIC infection ratio (volume to volume) is 1.0×10³-5.0×10³, 5.0×10³-1.0×10⁴, 1.0×10⁴-5.0×10⁴, 5.0×10⁴-1.0×10⁵, 1.0×10⁵-5.0×10⁵, 5.0×10⁵-1.0×10⁶, 1.0×10³, 2.0×10³, 3.0×10³, 4.0×10³, 5.0×10³, 6.0×10³, 7.0×10³, 8.0×10³, 9.0×10³, 1.0×10⁴, 2.0×10⁴, 3.0×10⁴, 4.0×10⁴, 5.0×10⁴, 6.0×10⁴, 7.0×10⁴, 8.0×10⁴, or 9.0×10⁴, 1.0×10⁵, 2.0×10⁵, 3.0×10⁵, 4.0×10⁵, 5.0×10⁵, 6.0×10⁵, 7.0×10⁵, 8.0×10⁵, or 9.0×10⁵ BIIC-per-VPC. In certain embodiments, the VPC-to-BIIC infection ratio (cell to cell) is 1.0×1.0³-5.0×10³, 5.0×10³-1.0×10⁴, 1.0×1.0⁴-5.0×10⁴, 5.0×10⁴-1.0×10⁵, 1.0×1.0⁵-5.0×10⁵, 5.0×10⁵-1.0×10⁶, 1.0×10³, 2.0×10³, 3.0×10³, 4.0×10³, 5.0×10³ 6.0×10³, 7.0×10³, 8.0×10³, 9.0×10³, 1.0×10⁴, 2.0×10⁴, 3.0×10⁴, 4.0×10⁴, 5.0×10⁴, 6.0×10⁴, 7.0×10⁴, 8.0×10⁴, or 9.0×10⁴, 1.0×10⁵, 2.0×10⁵, 3.0×10⁵, 4.0×10⁵, 5.0×10⁵, 6.0×10⁵, 7.0×10⁵, 8.0×10⁵, or 9.0×10⁵ BIIC-per-VPC.

[0556] In certain embodiments, Infection BIICs which comprise Expression BEVs are combined with the VPCs in target ratios of VPC-to-BIIC. In certain embodiments, the VPC-to-BIIC infection ratio (volume to volume) is 1.0×10³-5.0×10³, 5.0×10³-1.0×10⁴, 1.0×10⁴-5.0×10⁴, 5.0×10⁴-1.0×10⁵, 1.0×10⁵-5.0×10⁵, 5.0×10⁵-1.0×10⁵, 1.0×10³, 2.0×10³, 3.0×10³, 4.0×10³, 5.0×10³, 6.0×10³, 7.0×10³, 8.0×10³, 9.0×10³, 1.0×10⁴, 2.0×10⁴, 3.0×10⁴, 4.0×10⁴, 5.0×10⁴, 6.0×10⁴, 7.0×10⁴, 8.0×10⁴, or 9.0×10⁴, 1.0×10⁵, 2.0×10⁵, 3.0×10⁵, 4.0×10⁵, 5.0×10⁵, 6.0×1.0⁵, 7.0×10⁵, 8.0×10⁵, or 9.0×10⁵ BIIC-per-VPC. In certain embodiments, the VPC-to-BIIC infection ratio (cell to cell) is 1.0×10³-5.0×10³, 5.0×10³-1.0×10⁴, 1.0×10⁴-5.0×10⁴, 5.0×10⁴-1.0×10⁵, 1.0×10⁵-5.0×10⁵, 5.0×10⁵-1.0×10⁶, 1.0×10³, 2.0×10³, 3.0×10³, 4.0×10³, 5.0×10³, 6.0×10³, 7.0×10³, 8.0×10³, 9.0×10³, 1.0×10⁴, 2.0×10⁴, 3.0×10⁴, 4.0×10⁴, 5.0×10⁴, 6.0×10⁴, 7.0×10⁴, 8.0×10⁴, or 9.0×10⁴, 1.0×10⁵, 2.0×10⁵, 3.0×10⁵, 4.0×10⁵, 5.0×10⁵, 6.0×10⁵, 7.0×10⁵, 8.0×10⁵, or 9.0×10⁵ BIIC-per-VPC.

[0557] In certain embodiments, Infection BIICs which comprise Payload BEVs are combined with the VPCs in target ratios of VPC-to-BHC, In certain embodiments, the NPC-to-BIIC infection ratio (volume to volume) is 1.0×10³-5.0×10³, 5.0×10³-1.0×10⁴, 1.0×10⁴-5.0×10⁴, 5.0×10⁴-1.0×10⁵, 1.0×10⁵-5.0×10⁵, 5.0×10⁵-1.0×10⁶, 1.0×10³, 2.0×10³, 3.0×10³, 4.0×10³, 5.0×10³, 6.0×10³, 7.0×10³, 8.0×10³, 9.0×10³, 1.0×10⁴, 2.0×10⁴, 3.0×10⁴, 4.0×10⁴, 5.0×10⁴, 6.0×10⁴, 7.0×10⁴, 8.0×10⁴, or 9.0×10⁴, 1.0×10⁵, 2.0×10⁵, 3.0×10⁵, 4.0×10⁵, 5.0×10⁵, 6.0×10⁵, 7.0×10⁵, 8.0×10⁵, or 9.0×10⁵ BHC-per-VPC. In certain embodiments, the VPC-to-BIIC infection ratio (cell to cell) is 1.0×10³-5.0×10³, 5.0×10³-1.0×10⁴, 1.0×10⁴-5.0×10⁴, 5.0×1.0⁴-1.0×10⁵, 1.0×1.0⁵-5.0×10⁵, 5.0×10⁵-1.0×10⁶, 1.0×1.0³, 2.0×10³, 3.0×10³, 4.0×10³, 5.0×10³, 6.0×10³, 7.0×10³, 8.0×10³, 9.0×10³, 10×10⁴, 2.0×10⁴, 3.0×10⁴, 4.0×10⁴, 5.0×10⁴, 6.0×10⁴, 7.0×10⁵, 8.0×10⁴, or 9.0×10⁴, 1.0×10⁵, 2.0×10⁵, 3.0×10⁵, 4.0×10⁵, 5.0×10⁵, 6.0×10⁵, 7.0×10⁵, 8.0×10⁵, or 9.0×10⁵ BIIC-per-VPC.

[0558] In certain embodiments, Infection BIICs which comprise Expression BEVs and Infection BIICs which comprise Payload BEVs are combined with the VPCs in target BIIC-to-BIIC ratios. In certain embodiments, the ratio of Expression (Rep/Cap) BIICs to Payload RUCs is 10:1, 9:1, 8:1, 7:1, 6:1, 5:1, 4.5:1, 4:1, 3.5:1, 3:1, 2.5:1, 2:1, 1.5:1, 1:1, 1:1.5, 1:2, 1:2.5, 1:3, 1:3.5, 1:4 1:4.5, 1:5, 1:5,5, 1:6, 1:6.5, 1:7, 1:7.5, 1:8, 1:9, 1:10, 3.5-4.5:1, 3-4:1, 2.5-3.5:1, 2-3:1, 1.5-2.5:1, 1-2:1, 1-1.5:1, 1:1-1.5, 1:1-2, 1:1.5-2.5, 1:2-3, 1:2.5-3.5, 1:3-4, 1:3.5-4.5, 1:4-5, 1:4.5-5.5, 1:5-6, 1:5.5-6.5, 1:6-7, or 1:6.5-7.5. 105601 FIG. 4A, FIG. 4B, FIG. 6A and FIG. 6B show that a VPC density at transfection/infection of between 3.0-3.4×10⁶ cells/mL, particularly 3.2×10⁶ cells/mL, combined with a VPC-to-BIIC^{Rep/Cap} ratio of about 1:300K v/v and a VPC-to-BIIC^{Payload} ratio of about 1:100K v/v (3:1 BIIC-to-BIIC ratio), provide favorable AAV titer (vg/mL) and Capsid Full %.

[0559] In certain embodiments, infected Viral Production Cells are incubated under a certain Dissolved Oxygen (DO) Content (DO %). In certain embodiments, infected Viral Production Cells are incubated under a DO % between 10%-50%, 20%-40%, 10%-20%, 15%-25%, 20%-30%, 25%-35%, 30%-40%, 35%-45%, 40%-50%, 10%-15%, 15%-20%, 20%-25%, 25%-30%, 30%-35%, 35%-40%, 40%-45%, or 45%-50%. In certain embodiments, infected Viral Production Cells are incubated under a DO % of about 10%, about 15%, about 20%, about 25%, about 30%, about 35%, about 40%, about 45%, about 50%. In certain embodiments, infected Viral Production Cells are incubated under a DO % between 20%-30% or about 25%. In certain embodiments, infected Viral Production Cells are incubated under a DO % between 25%-35% or about 30%. In certain embodiments, infected Viral Production Cells are incubated under a DO % between 30%-40% or about 35%. in certain embodiments, infected Viral Production Cells are incubated under a DO % between 35%-45% or about 40%.

### Cell Lysis

[0560] Cells of the present disclosure, comprising, but not limited to viral production cells, may he subjected to cell lysis according to any methods known in the art. Cell lysis may be carried out to obtain one or more agents (e.g. viral particles) present within any cells of the disclosure. In certain embodiments, a bulk harvest of AAV particles and viral production cells is subjected to cell lysis according to the present disclosure.

[0561] In certain embodiments, cell lysis may be carried out according to any of the methods or systems presented in U.S. Pat. Nos. 7,326,555, 7,579,181, 7,048,920, 6,410,300, 6,436,394, 7,732,129, 7,510,875, 7,445,930, 6,726,907, 6,194,191, 7,125,706, 6,995,006, 6,676,935, 7,968,333, 5,756,283, 6,258,595, 6,261,551, 6,270,996, 6,281,010, 6,365,394, 6,475,769, 6,482,634, 6,485,966, 6,943,019, 6,953,690, 7,022,519, 7,238,526, 7,291,498 and 7,491,508 or International Publication Nos. WO1996039530, WO1998010088, WO1999014354, WO1999015685, WO1999047691, WO2000055342, WO2000075353 and WO2001023597, the contents of each of which are herein incorporated by reference in their entirety.

[0562] Cell lysis methods and systems may be chemical or mechanical. Chemical cell lysis typically comprises contacting one or more cells with one or more chemical lysis agent under chemical lysis conditions. Mechanical lysis typically comprises subjecting one or more cells to cell lysis carried out by mechanical force. Lysis can also be completed by allowing the cells to degrade after reaching ˜0% viability.

[0563] In certain embodiments, chemical lysis may be used to lyse cells. As used herein, the term “chemical lysis agent” refers to any agent that may aid in the disruption of a cell. In certain embodiments, lysis agents are introduced in solutions, termed lysis solutions or lysis buffers. As used herein, the term “chemical lysis solution” refers to a solution (typically aqueous) comprising one or more lysis agent. In addition to lysis agents, lysis solutions may comprise one or more buffering agents, solubilizing agents, surfactants, preservatives, cryoprotectants, enzymes, enzyme inhibitors and/or chelators. Lysis buffers are lysis solutions comprising one or more buffering agent. Additional components of lysis solutions may comprise one or more solubilizing agent. As used herein, the term “solubilizing agent” refers to a compound that enhances the solubility of one or more components of a solution and/or the solubility of one or more entities to which solutions are applied. In certain embodiments, solubilizing agents enhance protein solubility. In certain embodiments, solubilizing agents are selected based on their ability to enhance protein solubility while maintaining protein conformation and/or activity.

[0564] Exemplary lysis agents may comprise any of those described in U.S. Pat. Nos. 8,685,734, 7,901,921, 7,732,129, 7,223,585, 7,125,706, 8,236,495, 8,110,351, 7,419,956, 7,300,797, 6,699,706 and 6,143,567, the contents of each of which are herein incorporated by reference in their entirety. In certain embodiments, lysis agents may be selected from lysis salts, amphoteric agents, cationic agents, ionic detergents and non-ionic detergents. Lysis salts may comprise, but are not limited to, sodium chloride (NaCl) and potassium chloride (KCl) Further lysis salts may comprise any of those described in U.S. Pat. Nos. 8,614,101, 7,326,555, 7,579,181, 7,048,920, 6,410,300, 6,436,394, 7,732,129, 7,510,875, 7,445,930, 6,726,907, 6,194,191, 7,125,706, 6,995,006, 6,676,935 and 7,968,333, the contents of each of which are herein incorporated by reference in their entirety.

[0565] In certain embodiments, the cell lysate solution comprises a stabilizing additive. In certain embodiments, the stabilizing additive can comprise trehalose, glycine betaine, mannitol, potassium citrate, CuCl₂, proline, xylitol, NDSB 201, CTAB and K₂PO₄. In certain embodiments, the stabilizing additive can comprise amino acids such as arginine, or acidified amino acid mixtures such as arginine HCl. In certain embodiments, the stabilizing additive can comprise 0,1 M arginine or arginine HCl. In certain embodiments, the stabilizing additive can comprise 0.2 M arginine or arginine HCl. In certain embodiments, the stabilizing additive can comprise 0.25 M arginine or arginine HCl. In certain embodiments, the stabilizing additive can comprise 0.3 M arginine or arginine HCl. In certain embodiments, the stabilizing additive can comprise 0.4 M arginine or arginine HCl. In certain embodiments, the stabilizing additive can comprise 0.5 M arginine or arginine HCl. In certain embodiments, the stabilizing additive can comprise 0.6 M arginine or arginine HCl. In certain embodiments, the stabilizing additive can comprise 0.7 M arginine or arginine HCl. In certain embodiments, the stabilizing additive can comprise 0.8 M arginine or arginine HCl. In certain embodiments, the stabilizing additive can comprise 0.9 M arginine or arginine HCl. In certain embodiments, the stabilizing additive can comprise 1.0M arginine or arginine HCl.

[0566] Concentrations of salts may be increased or decreased to obtain an effective concentration for the rupture of cell membranes. Amphoteric agents, as referred to herein, are compounds capable of reacting as an acid or a base. Amphoteric agents may comprise, but are not limited to lysophosphatidylcholine, 3((3-Cholamidopropyl) dimethylammonium)-1-propanesulfonate (CHAPS), ZWITTERGENT® and the like. Cationic agents may comprise, but are not limited to, cetyltrimethylammonium bromide (C (16) TAB) and Benzalkonium chloride. Lysis agents comprising detergents may comprise ionic detergents or non-ionic detergents.

[0567] Detergents may function to break apart or dissolve cell structures comprising, but not limited to cell membranes, cell walls, lipids, carbohydrates, lipoproteins and glycoproteins. Exemplary ionic detergents comprise any of those taught in U.S. Pat. Nos. 7,625,570 and 6,593,123 or US Publication No. US2014/0087361, the contents of each of which are herein incorporated by reference in their entirety. In certain embodiments, the lysis solution comprises one or more ionic detergents. Example of ionic detergents for use in a lysis solution comprise, but are not limited to, sodium dodecyl sulfate (SDS), cholate and deoxycholate. In certain embodiments, ionic detergents may be comprised in lysis solutions as a solubilizing agent. In certain embodiments, the lysis solution comprises one or more nonionic detergents. Non-ionic detergents for use in a lysis solution may comprise, but are not limited to, octylgiucoside, digitonin, lubrol, C12E8, TWEEN®-20, TWEEN®-80, Triton X-100, Triton X-114, Brij-35, Brij-58, and Noniodet P-40. Non-ionic detergents are typically weaker lysis agents but may be comprised as solubilizing agents for solubilizing cellular and/or viral proteins. In certain embodiments, the lysis solution comprises one or more zwitterionic detergents. Zwitterionic detergents for use in a lysis solution may comprise, but are not limited to: Lauryl dimethylamine N-oxide (LDAO); N,N-Dimethyl-N-dodecylglycine betaine (Empigen® BB); 3-(N,N-Dimethylmyristylammonio)propanesulfonate (Zwittergent® 3-10); n-Dodecyl-N,N-dimethyl-3-ammonio-1-propariesulfonate (Zwittergent® 3-12); n-Tetradecyl-N,N-dimethyl-3-ammonio-1-propanesulfonate (Zwittergent® 3-14); 3-(1\,N-Dimethylpalmitylammonio) propanesulfonate (Zwittergent® 3-16); 3-((3-cholainidopropyl)dimethylammonio)-1-propariesulfonate (CHAPS); and 3-([3-Cholainidopropyl]dimethylammonio)-2-hydroxy-1-propanesulfonate (CHAPSO).

[0568] In certain embodiments, the lysis solution comprises Triton X-100, such as 0.5% w/v of Triton X-100. In certain embodiments, the lysis solution comprises Lauryldimethylamine N-oxide (LDAO), such as 0.184% w/v (4×CMC) of LDAO. In certain embodiments, the lysis solution comprises a seed oil surfactant such as Ecosurf™ SA-9. In certain embodiments, the lysis solution comprises N,N-Dimethyl-N-dodec,71₁,*,7cine betaine (Empigen® BB). In certain embodiments, the lysis solution comprises a Zwittergent® detergent, such as Zwittergent® 3-12 (n-Dodecyl-N,N-dimethyl-3-ammonio-1-propanesulfonate), Zwittergent® 3-14 (n-Tetradecyl-N,N-dimethyl-3-ammonio-1-propanesulfonate), or Zwittergent® 3-16 (3-(N,N-Dimethyl palmitylammonio)propanesulfonate).

[0569] Further lysis agents may comprise enzymes and urea. In certain embodiments, one or more lysis agents may be combined in a lysis solution in order to enhance one or more of cell lysis and protein solubility. In certain embodiments, enzyme inhibitors may be comprised in lysis solutions in order to prevent proteolysis that may be triggered by cell membrane disruption.

[0570] In certain embodiments, the lysis solution comprises between 0.1-1.0% w/v, between 0.2-0.8% w/v, between 0.3-0.7% w/v, between 0.4-0.6% w/v, or about 0.5% w/v of a cell lysis agent (e.g. detergent). In certain embodiments, the lysis solution comprises between 0.3-0.35% w/v, between 0.35-0.4% w/v, between 0.4-0.45% w/v, between 0.45-0.5% w/v, between 0.5-0.55% w/v, between 0.55-0.6% w/v, between 0.6-0.65% w/v, or between 0.65-0.7% w/v of a cell lysis agent (e.g. detergent).

[0571] In certain embodiments, cell lysates generated from adherent cell cultures may be treated with one more nuclease, such as Benzonase nuclease (Grade I, 99% pure) or c-LEcta. Denarase nuclease (formerly Sartorius Denarase). In certain embodiments, nuclease is added to lower the viscosity of the lysates caused by liberated DNA.

[0572] In certain embodiments, chemical lysis uses a single chemical lysis mixture. In certain embodiments, chemical lysis uses several lysis agents added in series to provide a final chemical lysis mixture.

[0573] In certain embodiments, a chemical lysis mixture comprises an acidified amino acid mixture (such as arginine HCl), a non-ionic detergent (such as Triton X-100), and a nuclease (such as Benzonase nuclease). In certain embodiments, the chemical lysis mixture can comprise an acid or base to provide a target lysis pH.

[0574] In certain embodiments, chemical lysis is conducted under chemical lysis conditions. As used herein, the term “chemical lysis conditions” refers to any combination of environmental conditions (e.g., temperature, pressure, pH, etc) which targets cells can be lysed by a chemical lysis agent.

[0575] In certain embodiments, the lysis pH is between 3.0-3.5, 3.5-4.0, 4.0-4.5, 4.5-5.0, 5.0-5.5, 5.5-6.0, 6.0-6.5, 6.5-7.0, 7.0-7.5, or 7.5-8.0. In certain embodiments, the lysis pH is between 6.0-7.0, 6.5-7.0, 6.5-7.5, or 7.0-7.5.

[0576] In certain embodiments, the lysis temperature is between 15-35° C. between 20-30° C., between 25-39° C., between 20-21° C., between 20-22° C., between 21-22° C., between 21-23° C., between 22-23° C., between 22-24° C., between 23-24° C., between 23-25° C., between 24-25° C., between 24-26° C., between 25-26° C., between 25-27° C., between 26-27° C., between 26-28° C., between 27-28° C., between 27-29 CC, between 28-29° C., between 28-30° C., between 29-30° C., between 29-31° C., between 30-31° C., between 30-32° C., between 31-32° C., or between 31-33° C,.

[0577] In certain embodiments, mechanical cell lysis is carried out. Mechanical cell lysis methods may comprise the use of one or more lysis condition and/or one or more lysis force. As used herein, the term “lysis condition” refers to a state or circumstance that promotes cellular disruption. Lysis conditions may comprise certain temperatures, pressures, osmotic purity, salinity and the like. In certain embodiments, lysis conditions comprise increased or decreased temperatures. According to certain embodiments, lysis conditions comprise changes in temperature to promote cellular disruption. Cell lysis carried out according to such embodiments may comprise freeze-thaw lysis. As used herein, the term “freeze-thaw lysis” refers to cellular lysis in which a cell solution is subjected to one or more freeze-thaw cycle. According to freeze-thaw lysis methods, cells in solution are frozen to induce a mechanical disruption of cellular membranes caused by the formation and expansion of ice crystals. Cell solutions used according freeze-thaw lysis methods, may further comprise one or more lysis agents, solubilizing agents, buffering agents, cryoprotectants, surfactants, preservatives, enzymes, enzyme inhibitors and/or chelators. Once cell solutions subjected to freezing are thawed, such components may enhance the recovery of desired cellular products. In certain embodiments, one or more cryoprotectants are comprised in cell solutions undergoing freeze-thaw lysis. As used herein, the term “cryoprotectant” refers to an agent used to protect one or more substance from damage due to freezing. Cryoprotectants may comprise any of those taught in US Publication No. US2013/0323302 or U.S. Pat. Nos. 6,503,888, 6,180,613, 7,888,096, 7,091,030, the contents of each of which are herein incorporated by reference in their entirety. In certain embodiments, cryoprotectants may comprise, but are not limited to dimethyl sulfoxide, 1,2-propanediol, 2,3-butanediol, formamide, glycerol, ethylene glycol, 1,3-propanediol and n-dimethyl formamide, polyvinylpyrrolidone, hydroxyethyl starch, agarose, dextrans, inositol, glucose, hydroxyethylstarch, lactose, sorbitol, methyl glucose, sucrose and urea. In certain embodiments, freeze-thaw lysis may be carried out according to any of the methods described in U.S. Pat. No. 7,704,721, the contents of which are herein incorporated by reference in their entirety.

[0578] As used herein, the term “lysis force” refers to a physical activity used to disrupt a cell. Lysis forces may comprise, but are not limited to mechanical forces, sonic forces, gravitational forces, optical forces, electrical forces and the like. Cell lysis carried out by mechanical force is referred to herein as “mechanical lysis.” Mechanical forces that may be used according to mechanical lysis may comprise high shear fluid forces. According to such methods of mechanical lysis, a microfluidizer may he used. Microfluidizers typically comprise an inlet reservoir where cell solutions may be applied. Cell solutions may then be pumped into an interaction chamber via a pump (e.g. high-pressure pump) at high speed and/or pressure to produce shear fluid forces. Resulting lysates may then be collected in one or more output reservoir. Pump speed and/or pressure may he adjusted to modulate cell lysis and enhance recovery of products (e.g. viral particles.) Other mechanical lysis methods may comprise physical disruption of cells by scraping.

[0579] Cell lysis methods may be selected based on the cell culture format of cells to be lysed. For example, with adherent cell cultures, some chemical and mechanical lysis methods may be used. Such mechanical lysis methods may comprise freeze-thaw lysis or scraping. In another example, chemical lysis of adherent cell cultures may be carried out through incubation with lysis solutions comprising surfactant, such as Triton-X-100.

[0580] In certain embodiments, a method for harvesting AAV particles without lysis may be used for efficient and scalable AAV particle production. In a non-limiting example, AAV particles may be produced by culturing an AAV particle lacking a heparin binding site, thereby allowing the AAV particle to pass into the supernatant, in a cell culture, collecting supernatant from the culture; and isolating the AAV particle from the supernatant, as described in US Patent Application 20090275107, the contents of which are incorporated herein by reference in their entirety.

### Clarification and Purification: General

[0581] Cell lysates comprising viral particles may be subjected to clarification and purification. Clarification generally refers to the initial steps taken in the purification of viral particles from cell lysates and serves to prepare lysates for further purification by removing larger, insoluble debris from a bulk lysis harvest. Viral production can comprise clarification steps at any point in the viral production process. Clarification steps may comprise, but are not limited to, centrifugation and filtration. During clarification, centrifugation may be carried out at low speeds to remove larger debris only. Similarly, filtration may be carried out using filters with larger pore sizes so that only larger debris is removed.

[0582] Purification generally refers to the final steps taken in the purification and concentration of viral particles from cell lysates by removing smaller debris from a clarified lysis harvest in preparing a final Pooled Drug Substance. Viral production can comprise purification steps at any point in the viral production process. Purification steps may comprise, but are not limited to, filtration and chromatography. Filtration may be carried out using filters with smaller pore sizes to remove smaller debris from the product or with larger pore sizes to retain larger debris from the product. Filtration may be used to alter the concentration and/or contents of a viral production pool or stream. Chromatography may be carried out to selectively separate target particles from a pool of impurities.

[0583] Large-scale production of high-concentration AAV formulations is complicated by the tendency for high concentrations of AAV particles to aggregate or agglomerate. Small scale clarification and concentration systems, such as dialysis cassettes or spin centrifugation, are generally not sufficiently scalable for large-scale production. The present disclosure provides embodiments of a clarification, purification and concentration system for processing large volumes of high-concentration AAV production formulations. In certain embodiments, the large-volume clarification system comprises one or more of the following processing steps: Depth Filtration, Microfiltration (e.g. 0.2 μm Filtration). Affinity Chromatography, Ion Exchange Chromatography such as anion exchange chromatography (AEX) or cation exchange chromatography (CEX), a tangential flow filtration system (TFF), Nanofiltration (e.g. Virus Retentive Filtration (VIM), Final Filtration (FT), and Fill Filtration,

[0584] Objectives of viral clarification and purification comprise high throughput processing of cell lysates and to optimize ultimate viral recovery. Advantages of comprising clarification and purification steps of the present disclosure comprise scalability for processing of larger volumes of lysate, In certain embodiments, clarification and purification may be carried out according to any of the methods or systems presented in U.S. Pat. Nos. 8,524,446, 5,756,283, 6,258,595, 6,261,551, 6,270,996, 6,281,010, 6,365,394, 6,475,769, 6,482,634, 6,485,966, 6,943,019, 6,953,690, 7,022,519, 7,238,526, 7,291,498, 7,491,508, US Publication Nos, US2013/0045186, US2011/0263027, US2011/0151434, US200310138772, and International Publication Nos. WO2002012455, WO1996039530, WO1998010088, WO1999014354, WO1999015685, WO1999047691, WO2000055342, WO2000075353 and WO2001023597, the contents of each of which are herein incorporated by reference in their entirety.

[0585] In certain embodiments, the compositions comprising at least one AAV particle may be isolated or purified using the methods or systems described in U.S. Pat. Nos. 6,146,874, 6,660,514, 8,283,151 or 8,524,446, the contents of which are herein incorporated by reference in their entirety.

### Clarification and Purification: Centrifugation

[0586] According to certain embodiments, cell lysates may be clarified by one or more centrifugation steps. Centrifugation may be used to pellet insoluble particles in the lysate. During clarification, centrifugation strength (which can be expressed in terms of gravitational units (g), which represents multiples of standard gravitational force) may be lower than in subsequent purification steps. In certain embodiments, centrifugation may be carried out on cell lysates at a gravitation force from about 200 g to about 800 g, from about 500 g to about 1500 g, from about 1000 g to about 5000 g, from about 1200 g to about 10000 g or from about 8000 g to about 15000 g. In certain embodiments, cell lysate centrifugation is carried out at 8000 g for 15 minutes. In certain embodiments, density gradient centrifugation may be carried out in order to partition particulates in the cell lysate by sedimentation rate. Gradients used according to methods or systems of the present disclosure may comprise, but are not limited to, cesium chloride gradients and iodixanol step gradients. In certain embodiments, centrifugation uses a decanter centrifuge system. In certain embodiments, centrifugation uses a disc-stack centrifuge system. In certain embodiments, centrifugation comprises ultracentrifugation, such two-cycle CsCl gradient ultracentrifugation or iodixanol discontinuous density gradient ultracentrifugation.

### Clarification and Purification: Filtration

[0587] In certain embodiments, one or more microfiltration, nanofiltration and/or ultrafiltration steps may be used during clarification, purification and/or sterilization. The one or more microfiltration, nanofiltration or ultrafiltration steps can comprise the use of a filtration system such as EMD Millipore Express SHC XTIO 0.5/0.2 μm filter, EMD Millipore Express SFICXL6000 0.5/0.2 μm filter, EMD Millipore Express SFICXL150 filter, EMD Millipore Millipak Gamma Gold 0.22 μm filter (dual-in-line sterilizing grade filters), a Pall Supor EKV, 0.2 μm sterilizing-grade filter, Asahi Planova 35N, Asahi Planova 20N, Asahi Planova 75N, Asahi Planova BioEx, Millipore Viresolve NFR or a Sartorius Sartopore 2XLG, 0.8/0.2 μm.

[0588] In certain embodiments, one or more microfiltration steps may be used during clarification, purification and/or sterilization. Microfiltration utilizes microfiltration membranes with pore sizes typically between 0.1 μm and 10 μm. Microfiltration is generally used for general clarification, sterilization, and removal of microparticulates. In certain embodiments, microfiltration is used to remove aggregated clumps of viral particles. In certain embodiments, a production process or system of the present disclosure comprises at least one microfiltration step. The one or more microfiltration steps can comprise a Depth Filtration step with a Depth Filtration system, such as EMD Millipore Millistak⁺ POD filter (D0HC media series), Millipore MC0SP23CL3 filter (COSP media series), or Sartorius Sartopore filter series. Microfiltration systems of the present disclosure can be pre-rinsed, packed, equilibrated, flushed, processed, eluted, washed or cleaned with formulations known to those in the art, comprising AAV pharmaceutical, processing and storage formulations of the present disclosure.

[0589] In certain embodiments, one or more ultrafiltration steps may be used during clarification and purification. The ultrafiltration steps can be used for concentrating, formulating, desalting or dehydrating either processing and/or formulation solutions of the present disclosure. Ultrafiltration utilizes ultrafiltration membranes, with pore sizes typically between 0.001 and 0.1 μm. Ultrafiltration membranes can also be defined by their molecular weight cutoff (MWCO) and can have a range from 1 kD to 500 kD. Ultrafiltration is generally used for concentrating and formulating dissolved biomolecules such as proteins, peptides, plasmids, viral particles, nucleic acids, and carbohydrates. Ultrafiltration systems of the present disclosure can be pre-rinsed, packed, equilibrated, flushed, processed, eluted, washed or cleaned with formulations known to those in the art, comprising AAV pharmaceutical, processing and storage formulations of the present disclosure.

[0590] In certain embodiments, one or more nanofiltration steps may be used during clarification and purification. Nanofiltration utilizes nanofiltration membranes, with pore sizes typically less than 100 nm. Nanofiltration is generally used for removal of unwanted endogenous viral impurities (e.g. baculovirus). In certain embodiments, nanofiltration can comprise viral removal filtration (VRF). VRF filters can have a filtration size typically between 15 nm and 100 nm. Examples of VIZ filters comprise (but are not limited to): Planova 15N, Planova 20N, and Planova 35N (Asahi-Kasei Corp, Tokyo, Japan); and Viresolve NFP and Viresolve NFR (Millipore Corp, Billerica, Mass., USA). Nanofiltration systems of the present disclosure can be pre-rinsed, packed, equilibrated, flushed, processed, eluted, washed or cleaned with formulations known to those in the art, comprising AAV pharmaceutical, processing and storage formulations of the present disclosure. In certain embodiments, nanofiltration is used to remove aggregated clumps of viral particles.

[0591] In certain embodiments, one or more tangential flow filtration (TFF) (also known as cross-flow filtration) steps may be used during clarification and purification, Tangential flow filtration is a form of membrane filtration in which a feed stream (which comprises the target agent/particle to be clarified and concentrated) flows from a feed tank into a filtration module or cartridge, Within the TFF filtration module, the feed stream passes parallel to a membrane surface, such that one portion of the stream passes through the membrane (permeate/filtrate) while the remainder of the stream (retentate) is recirculated back through the filtration system and into the feed tank.

[0592] In certain embodiments, the TFF filtration module can be a flat plate module (stacked planar cassette), a spiral wound module (spiral-wound membrane layers), or a hollow fiber module (bundle of membrane tubes). Examples of TFF systems for use in the present disclosure comprise, but are not limited to: Spectrum mPES Hollow Fiber TFF system (0.5 mm fiber ID, 100 kDA MWCO) or Millipore Ultracel PLCTK system with Pellicon-3 cassette (0.57 m², 30 kDA INIWCO).

[0593] New buffer materials can be added to the TFF feed tank as the feed stream is circulated through the TFF filtration system. In certain embodiments, buffer materials can be fully replenished as the flow stream circulates through the TFF filtration system. In this embodiment, buffer material is added to the stream in equal amounts to the buffer material lost in the permeate, resulting in a constant concentration. In certain embodiments, buffer materials can be reduced as the flow stream circulates through the filtration system. In this embodiment, a reduced amount of buffer material is added to the stream relative to the buffer material lost in the permeate, resulting in an increased concentration. In certain embodiments, buffer materials can be replaced as the flow stream circulates through the filtration system. In this embodiment, the buffer added to stream is different from buffer materials lost in the permeate, resulting in an eventual replacement of buffer material in the stream. TFF systems of the present disclosure can be pre-rinsed, packed, equilibrated, flushed, processed, eluted, washed or cleaned with formulations known to those in the art, comprising AAV pharmaceutical, processing and storage formulations of the present disclosure.

[0594] In certain embodiments, a TFF load pool can be spiked with an excipient or diluent prior to filtration. In certain embodiments, a TFF load pool is spiked with a high-salt mixture (such as sodium chloride or potassium chloride) prior to filtration. in certain embodiments, a TFF load pool is spiked with a high-sugar mixture (such as 50% w/v sucrose) prior to filtration.

[0595] The effectiveness of TFF processing can depend on several factors, comprising (but not limited to): shear stress from flow design, cross-flow rate, filtrate flow control, transmembrane pressure (TMP), membrane conditioning, membrane composition (e.g. hollow fiber construction) and design (e.g. surface area), system flow design, reservoir design, and mixing strategy. In certain embodiment, the filtration membrane can be exposed to pre-TFF membrane conditioning.

[0596] In certain embodiments, TFF processing can comprise one or more microfiltration stages. In certain embodiments, TFF processing can comprise one or more ultrafiltration stages. In certain embodiments, TFF processing can comprise one or more nanofiltration stages.

[0597] In certain embodiments, TFF processing can comprise one or more concentration stages, such as an ultrafiltration (UF) or microfiltration (MF) concentration stage. In the concentration stage, a reduced amount of buffer material is replaced as the stream circulates through the filtration system (relative to the amount of buffer material lost as permeate). The failure to completely replace all of the buffer material lost in the permeate results in an increased concentration of viral particles within the filtration stream. In certain embodiments, an increased amount of buffer material is replaced as the stream circulates through the filtration system. The incorporation of excess buffer material relative to the amount of buffer material lost in the permeate results in a decreased concentration of viral particles within the filtration stream.

[0598] In certain embodiments, TFF processing can comprise one or more diafiltration (DF) stages. The diafiltration stage comprises replacement of a first buffer material (such as a high salt material) within a second buffer material (such a low-salt or zero-salt material). In this embodiment, a second buffer is added to flow stream which is different from a first buffer material lost in the permeate, resulting in an eventual replacement of buffer material in the stream.

[0599] In certain embodiments, TFF processing can comprise multiple stages in series. In certain embodiments, a TFF processing process can comprise an ultrafiltration (UF) concentration stage followed by a diafiltration stage (DF). In certain embodiments, a TFF processing can comprise a diafiltration stage followed by an ultrafiltration concentration stage. In certain embodiments, a TFF processing can comprise a first diafiltration stage, followed by an ultrafiltration concentration stage, followed by a second diafiltration stage. In certain embodiments, a TFF processing can comprise a first diafiltration stage which incorporates a high-salt-low-sugar buffer material into the flow stream, followed by an ultrafiltration/concentration stage which results in a high concentration of the viral material in the flow stream, followed by a second diafiltration stage which incorporates a low-salt-high-sugar or zero-salt-high-sugar buffer material into the flow stream. In certain embodiments, the salt can he sodium chloride, sodium phosphate, potassium chloride, potassium phosphate, or a combination thereof. In certain embodiments, the sugar can be sucrose, such as a 5% w/v sucrose mixture or a 7% w/v sucrose mixture.

[0600] In certain embodiments, the one or more TFF steps can comprise a formulation diafiltration step in which at least a portion of the liquid media of the viral production pool is replaced with a high-sucrose formulation buffer. In certain embodiments, the high-sucrose formulation buffer comprises between 6-8% w/v of a sugar or sugar substitute and between 90-100 mM of an alkali chloride salt. In certain embodiments, the high-sucrose formulation buffer comprises 7% w/v of sucrose and between 90-100 mM sodium chloride. In certain embodiments, the high-sucrose formulation buffer comprises 7% w/v of sucrose. 10 mM Sodium Phosphate, between 95-100 sodium chloride, and 0.001% (w/v) Poloxamer 188. In certain embodiments, the formulation diafiltration step is the final diafiltration step in the one or more TFF steps. In certain embodiments, the formulation diafiltration step is the only diafiltration step in the one or more TFF steps.

[0601] In certain embodiments, TFF processing can comprise multiple stages which occur contemporaneously. As a non-limiting example, a TFF clarification process can comprise an ultrafiltration stage which occurs contemporaneously with a concentration stage.

[0602] Methods of cell lysate clarification and purification by filtration are well understood in the art and may be carried out according to a variety of available methods comprising, but not limited to passive filtration and flow filtration. Filters used may comprise a variety of materials and pore sizes. For example, cell lysate filters may comprise pore sizes of from about 1 μM to about 5 μM, from about 0.5 μM to about 2 μM, from about 0.1 μM to about 1 μM, from about 0.05 μM to about 0.05 μM and from about 0.001 μM to about 0.1 μM. Exemplary pore sizes for cell lysate filters may comprise, but are not limited to, 2.0, 1.9, 1.8, 1.7, 1.6, 1.5, 1.4, 1.3, 1.2, 1.1, 1, 0.9. 0.8, 0.7, 0.6, 0.5, 0.4, 0.3, 0.2, 0.1, 0.95, 0.9, 0.85, 0.8, 0.75, 0.7, 0.65, 0.6, 0.55, 0.5, 0.45, 0.4, 0.35, 0.3, 0.25, 0.2, 0.15, 0.1, 0.05, 0.22, 0.21, 0.20, 0.19, 0.18, 0.17, 0.16, 0.15, 0.14, 0.13, 0.12, 0.11, 0.1, 0.09, 0.08, 0.07, 0.06, 0.05, 0.04, 0.03, 0.02, 0.01, 0.02, 0.019, 0.018, 0.017, 0.016, 0.015, 0.014, 0.013, 0.012, 0.011, 0.01, 0.009, 0.008, 0.007, 0.006, 0.005, 0.004, 0.003, 0.002, 0.001 and 0.001 μM. In certain embodiments, clarification may comprise filtration through a filter with 2.0 μM pore size to remove large debris, followed by passage through a filter with 0.45 μM pore size to remove intact cells.

[0603] Filter materials may be composed of a variety of materials. Such materials may comprise, but are not limited to, polymeric materials and metal materials (e.g. sintered metal and pored aluminum.) Exemplary materials may comprise, but are not limited to nylon, cellulose materials (e.g. cellulose acetate), polyvinylidene fluoride (PVDF), polyethersulfone, polyamide, polysulfone, polypropylene, and polyethylene terephthalate. In certain embodiments, filters useful for clarification of cell lysates may comprise, but are not limited to ULTIPLEAT PROFILE™ filters (Pall Corporation, Port Washington, N.Y.), SUPORIM membrane filters (Pall Corporation, Port Washington, N.Y.).

[0604] In certain embodiments, flow filtration may be carried out to increase filtration speed and/or effectiveness. In certain embodiments, flow filtration may comprise vacuum filtration. According to such methods, a vacuum is created on the side of the filter opposite that of cell lysate to be filtered. In certain embodiments, cell lysates may be passed through filters by centrifugal forces. In certain embodiments, a pump is used to force cell lysate through clarification filters. Flow rate of cell lysate through one or more filters may he modulated by adjusting one of channel size and/or fluid pressure.

### Clarification and Purification: Chromatography

[0605] In certain embodiments, AAV particles in a formulation may be clarified and purified from cell lysates through one or more chromatography steps using one or more different methods of chromatography. Chromatography refers to any number of methods known in the art for selectively separating out one or more elements from a mixture. Such methods may comprise, but are not limited to, ion exchange chromatography (e.g, cation exchange chromatography and anion exchange chromatography), affinity chromatography (e.g. immunoaffinity chromatography, metal affinity chromatography, pseudo affinity chromatography such as Blue Sepharose resins), hydrophobic interaction chromatography (HIC), size-exclusion chromatography, and multimodal chromatography (MMC) (chromatographic methods that utilize more than one form of interaction between the stationary phase and analytes). in certain embodiments, methods or systems of viral chromatography may comprise any of those taught in U.S. Pat. Nos, 5,756,283, 6,258,595, 6,261,551, 6,270,996, 6,281,010, 6,365,394, 6,475,769, 6,482,634, 6,485,966, 6,943,019, 6,953,690, 7,022,519, 7,238,526, 7,291,498 and 7,491,508 or International Publication Nos. WO1996039530, WO1998010088, WO1999014354, WO1999015685, WO1999047691, WO2000055342, WO2000075353 and WO2001023597, the contents of each of which are herein incorporated by reference in their entirety.

[0606] Chromatography systems of the present disclosure can be pre-rinsed, packed, equilibrated, flushed, processed, eluted, washed or cleaned with formulations known to those in the art, comprising AAV pharmaceutical, processing and storage formulations of the present disclosure.

[0607] In certain embodiments, one or more ion exchange (IEX) chromatography steps may be used to isolate viral particles. The ion exchange step can comprise anion exchange (AEX) chromatography, cation exchange (CEX) chromatography, or a combination thereof In certain embodiments, ion exchange chromatography is used in a bind/elute mode. Bind/elute IEX can he used by binding viral particles to a stationary phase based on charge-charge interactions between capsid proteins (or other charged components) of the viral particles and charged sites present on the stationary phase. This process can comprise the use of a column through which viral preparations (e.g. clarified lysates) are passed. After application of viral preparations to the charged stationary phase (e.g, column), bound viral particles may then be elated from the stationary phase by applying an elution solution to disrupt the charge-charge interactions. Elution solutions may be optimized by adjusting salt concentration and/or pH to enhance recovery of hound viral particles. In certain embodiments, the elution solution can comprise a nuclease such as Fienzonase nuclease. Depending on the charge of viral capsids being isolated, cation or anion exchange chromatography methods may be selected. In certain embodiments, ion exchange chromatography is used in a flow-through mode, Flow-through IEX can he used by binding non-viral impurities or unwanted viral particles to a stationary phase (based on charge-charge interactions) and allowing the target viral particles in the viral preparation to “flow through” the IEX system into a collection pool.

[0608] Methods or systems of ion exchange chromatography may comprise, but are not limited to any of those taught in U.S. Pat. Nos. 7,419,817, 6,143,548, 7,094,604, 6,593,123, 7,015,026 and 8,137,948, the contents of each of which are herein incorporated by reference in their entirety.

[0609] In certain embodiments, the TEX process uses an AEX chromatography system such as a Sartorius Sartobind Q membrane, a Sartorius Sartohind STIC membrane, a Millipore Fractogel TMAE HiCap(m) Flow-Through membrane, a GE Q Sepharose HP membrane, Poros XQ or Poros HQ. In certain embodiments, the IEX process uses a CEX system such as a Poros XS membrane. In certain embodiments, the AEX system comprises a stationary phase which comprises a trimethylammoniumethyl (TMAE) functional group. In certain embodiments, the IEX process uses a Multimodal Chromatography (MMC) system such as a Nuvia aPrime 4A membrane.

[0610] In certain embodiments, one or more affinity chromatography steps, such as immunoaffinity chromatography, may be used to isolate viral particles. Immunoaffinity chromatography is a form of chromatography that utilizes one or more immune compounds (e.g. antibodies or antibody-related structures) to retain viral particles. Immune compounds may bind specifically to one or more structures on viral particle surfaces, comprising, but not limited to one or more viral coat protein. In certain embodiments, immune compounds may be specific for a particular viral variant. In certain embodiments, immune compounds may bind to multiple viral variants. In certain embodiments, immune compounds may comprise recombinant single-chain antibodies. Such recombinant single chain antibodies may comprise those described in Smith, R. H. et al., 2009. Mol. Ther. 17(11):1888-96, the contents of which are herein incorporated by reference in their entirety. Such immune compounds are capable of binding to several AAV capsid variants, comprising, but not limited to AAV1, AAV2, AAV6 and AAV8 or any of those taught herein. In certain embodiments, the AFC process uses a GE AVB Sepharose HP column resin, Poros CaptureSelect AAV8 resins (ThermoFisher), Poros CaptureSelect AAV9 resins (ThermoFisher) and Poros CaptureSelect AAVX resins (ThermoFisher).

[0611] In certain embodiments, one or more size-exclusion chromatography (SEC) steps may be used to isolate viral particles. SEC may comprise the use of a gel to separate particles according to size. In viral particle purification, SEC filtration is sometimes referred to as “polishing.” In certain embodiments, SEC may be carried out to generate a final product that is near-homogenous. Such final products may in certain embodiments be used in pre-clinical studies and/or clinical studies (Kotin, R. M. 2011. Human Molecular Genetics. 20(1):R2-R6, the contents of which are herein incorporated by reference in their entirety.) In certain embodiments, SEC may be carried out according to any of the methods taught in U.S. Pat. Nos. 6,143,548, 7,015,026, 8,476,418, 6,410,300, 8,476,418, 7,419,817, 7,094,604, 6,593,123, and 8,137,948, the contents of each of which are herein incorporated by reference in their entirety.

### III. COMPOSITIOSN AND FORMULATIONS

### General

[0612] Gene therapy drug products (such as rAAV particles) are challenging to incorporate into composition and formulations due to their limited stability in the liquid state and a high propensity for large-scale aggregation at low concentrations. Gene therapy drug products are often delivered directly to treatment areas (comprising CNS tissue); which requires that excipients and formulation parameters be compatible with tissue function, microenvironment, and volume restrictions.

[0613] According to the present disclosure. AAV particles may he prepared as, or comprised in, pharmaceutical compositions. It will be understood that such compositions necessarily comprise one or more active ingredients and, most often, one or more pharmaceutically acceptable excipients.

[0614] Relative amounts of the active ingredient (e.g. AAV particle), a pharmaceutically acceptable excipient, and/or any additional ingredients in a pharmaceutical composition in accordance with the present disclosure may vary, depending upon the identity, size, and/or condition of the subject being treated and further depending upon the route by which the composition is to be administered. For example, the composition may comprise between 0.1% and 99% v/w) of the active ingredient. By way of example, the composition may comprise between 0.1% and 100%, e.g., between .5 and 50%, between 1-30%, between 5-80%, or at least 80% (w/w) active inuedient.

[0615] In certain embodiments, the AAV particle pharmaceutical compositions described herein may comprise at least one payload of the present disclosure. As a non-limiting example, the pharmaceutical compositions may contain an AAV particle with 1, 2, 3, 4 or 5 payloads.

[0616] Although the descriptions of pharmaceutical compositions provided herein are principally directed to pharmaceutical compositions which are suitable for administration to humans, it will be understood by the skilled artisan that such compositions are generally suitable for administration to any other animal, e.g., to non-human animals, e.g. non-human mammals. Modification of pharmaceutical compositions suitable for administration to humans in order to render the compositions suitable for administration to various animals is well understood, and the ordinarily skilled veterinary pharmacologist can design and/or perform such modification with merely ordinary, if any, experimentation. Subjects to which administration of the pharmaceutical compositions is contemplated comprise, but are not limited to, humans and; or other primates; mammals, comprising commercially relevant mammals such as cattle, pigs, horses, sheep, cats, dogs, mice, rats, birds, comprising commercially relevant birds such as poultry, chickens, ducks, geese, and/or turkeys.

[0617] In certain embodiments, compositions are administered to humans, human patient or subjects.

[0618] Formulations of the present disclosure can comprise, without limitation, saline, liposomes, lipid nanoparticles, polymers, peptides, proteins, cells transfected with AAV particles (e.g., for transfer or transplantation into a subject) and combinations thereof.

[0619] Formulations of the pharmaceutical compositions described herein may be prepared by any method known or hereafter developed in the art of pharmacology. As used herein the term “pharmaceutical composition” refers to compositions comprising at least one active ingredient and optionally one or more pharmaceutically acceptable excipients.

[0620] In general, such preparatory methods comprise the step of associating the active ingredient with an excipient and/or one or more other accessory ingredients. As used herein, the phrase “active ingredient” generally refers either to an AAV particle carrying a payload rethon encoding the polynucleotide or polypeptides of the present disclosure or to the end product encoded by a viral genome of an AAV particle as described herein.

[0621] In certain embodiments, the formulations may comprise at least one inactive ingredient. As used herein, the term “inactive ingredient” refers to one or more inactive agents comprised in formulations. In certain embodiments, all, none or some of the inactive ingredients which may be used in the formulations of the present disclosure may be approved by the US Food and Drug Administration (FDA).

[0622] Formulations of the AAV particles and pharmaceutical compositions described herein may be prepared by any method known or hereafter developed in the art of pharmacology. In general, such preparatory methods comprise the step of bringing the active ingredient into association with an excipient and/or one or more other accessory ingredients, and then, if necessary and/or desirable, dividing, shaping and/or packaging the product into a desired single- or multi-dose unit.

[0623] A pharmaceutical composition in accordance with the present disclosure may be prepared, packaged, and/or sold in bulk, as a single unit dose, and/or as a plurality of single unit doses. As used herein, a “unit dose” refers to a discrete amount of the pharmaceutical composition comprising a predetermined amount of the active ingredient. The amount of the active ingredient is generally equal to the dosage of the active ingredient which would be administered to a subject and/or a convenient fraction of such a dosage such as, for example, one-half or one-third of such a dosage.

[0624] In certain embodiments, formulations of the present disclosure are aqueous formulations (i.e. formulations which comprise water). In certain embodiments, formulations of the present disclosure comprise water, sanitized water, or Water-for-injection (WFI).

[0625] In certain embodiments, the AAV particles of the present disclosure may be formulated in PBS with 0.001%-0.1% (w/v) of Poloxamer 188 (e.g. Pluronic F-68) at a pH of about 7.0.

[0626] In certain embodiments, the , AV formulations described herein may contain sufficient AAV particles for expression of at least one expressed functional payload. As a non-limiting example, the AAV particles may contain viral genomes encoding 1, 2, 3, 4 or 5 functional payloads.

[0627] According to the present disclosure AAV particles may be formulated for CNS delivery. Agents that cross the brain blood barrier may be used. For example, some cell penetrating peptides that can target molecules to the brain blood barrier endothelium may be used for formulation (e.g., Mathupala, Expert Opin Ther Pat., 2009, 19, 137-140; the content of which is incorporated herein by reference in its entirety).

[0628] In certain embodiments, the AAV formulations described herein may comprise a buffering system which comprises phosphate, Tris, and/or Histidine. The buffering agents of phosphate, Tris, and/or Histidine may be independently used in the formulation in a range of 2-12 mM.

[0629] Formulations of the present disclosure can be used in any step of producing, processing, preparing, storing, expanding, or administering AAV particles and viral vectors of the present disclosure. in certain embodiments, pharmaceutical formulations and components can be use in AAV production, AAV processing, AAV clarification, AAV purification, and AAV finishing systems of the present disclosure, all of which can be pre-rinsed, packed, equilibrated, flushed, processed, eluted, washed or cleaned with formulations known to those in the art, comprising AAV pharmaceutical, processing and storage formulations of the present disclosure.

### Excipients and Diluents

[0630] The AAV particles of the present disclosure can be formulated into a pharmaceutical composition which comprises one or more excipients or diluents to (1) increase stability; (2) increase cell transfection or transduction; (3) permit the sustained or delayed release of the payload; (4) alter the biodistribution (e.g., target the viral particle to specific tissues or cell types); (5) increase the translation of encoded protein; (6) alter the release profile of encoded protein and/or (7) allow for regulatable expression of the payload of the present disclosure.

[0631] Relative amounts of the active ingredient (e.g. AAV particle), the pharmaceutically acceptable excipient, and/or any additional ingredients in a pharmaceutical composition in accordance with the present disclosure may vary, depending upon the identity, size, and/or condition of the subject being treated and further depending upon the route by which the composition is to be administered. in certain embodiments, the composition may comprise between 0.001% and 99% (w/w) of the active ingredient. By way of example, the composition may comprise between 0.001% and 100%, e.g., between 0.5 and 50%, between 1-30%, between 5-80%, or at least 80% (w/w) active ingredient. In certain embodiments, the composition may comprise between 0.001% arid 99% (w/w) of the excipients and diluents. By way of example, the composition may comprise between 0.001% and 100%, e.g., between 0.5 and 50%, between 1-30%, between 5-80%, or at least 80% (w/w) excipients and diluents.

[0632] In certain embodiments, a pharmaceutically acceptable excipient may be at least 95%, at least 96%, at least 97%, at least 98%, at least 99%, or 100% pure, In certain embodiments, an excipient is approved for use for humans and for veterinary use. In certain embodiments, an excipient may be approved by United States Food and Drug Administration. In certain embodiments, an excipient may be of pharmaceutical grade. In certain embodiments, an excipient may meet the standards of the United States Pharmacopoeia (USP), the European Pharmacopoeia (EP), the British Pharmacopoeia, and/or the International Pharmacopoeia.

[0633] Excipients, as used herein, comprise, but are not limited to, any and all solvents, dispersion media, diluents, or other liquid vehicles, dispersion or suspension aids, surface active agents, isotonic agents, thickening or emulsifying agents, preservatives, and the like, as suited to the particular dosage form desired. Various excipients for formulating pharmaceutical compositions and techniques for preparing the composition are known in the art (see Remington: The Science and Practice of Pharmacy, 21st Edition, A. R. Gennaro, Lippincott, Williams & Wilkins, Baltimore, Md., 2006; incorporated herein by reference in its entirety), The use of a conventional excipient medium may be contemplated within the scope of the present disclosure, except insofar as any conventional excipient medium may be incompatible with a substance or its derivatives, such as by producing any undesirable biological effect or otherwise interacting in a deleterious manner with any other component(s) of the pharmaceutical composition.

[0634] Exemplary excipients and diluents which can be comprised in formulations of the present disclosure comprise, but are not limited to, calcium carbonate, sodium carbonate, calcium phosphate, dicalcium phosphate, calcium sulfate, calcium hydrogen phosphate, sodium phosphate lactose, sucrose, cellulose, microcrystalline cellulose, kaolin, mannitol, sorbitol, inositol, sodium chloride, dry starch, cornstarch, powdered sugar, etc., and/or combinations thereof.

[0635] Exemplary excipients and diluents which can be comprised in formulations of the present disclosure comprise, but are not limited to, 1,2,6-fiexanetriol; 1,2-Dirrivristovi-Sn-Glycero-3-(Phospho-S-(1-Glycerol)); 1,2-Dimyristoyl-Sn-Glycero-3-Phosphocholine; 1,2-Diolcoyl-Sn-Glycero-3-Phosphocholine; 1,2-Dipalmitoyl-Sn-Glycem-3-(Phospho-Rac-(1-Glycerol)); 1,2-Distearoyl-Sn-Glycero-3-(Phospho-Rac-(1-Glycerol)); 1,2-Distearoyl-Sn-Glycero-3-Phosphocholine; 1-O-Tolyibiguanide; 2-Ethyl-1,6-Hexanediol; Acetic Acid; Acetic Acid, Glacial; Acetic Anhydride; Acetone; Acetone Sodium Bisulfite; Acetylated Lanolin Alcohols; Acetylated Monoglycerides; Acetylcysteine; Acetyltryptophan, DL-; Acrylates Copolymer; Acrylic Acid-Isooctyl Acrylate Copolymer; Acrylic Adhesive 788; Activated Charcoal; Adcote 72A103; Adhesive Tape; Adipic Acid; Aerotex Resin 3730; Alanine; Albumin Aggregated; Albumin Colloidal; Albumin Human; Alcohol; Alcohol, Dehydrated; Alcohol, Denatured; Alcohol, Diluted; Alfadex; Alginic Acid; Alkyl Ammonium Sulfonic Acid Betaine; Alkyl Aryl Sodium Sulfonate; Allantoin; Allyl Alpha-Ionone, Almond Oil; Alpha-Terpineol; Alpha-Tocopherol; Alpha-Tocopherol Acetate, Dl-; Alpha-Tocopherol, Dl-; Aluminum Acetate; Aluminum Chlorhydroxy Allantoinate; Aluminum Hydroxide; Aluminum Hydroxide—Sucrose, Hydrated; Aluminum Hydroxide Gel; Aluminum Hydroxide Gel F 500; Aluminum Hydroxide Gel F 5000; Aluminum Monostearate; Aluminum Oxide; Aluminum Polyester; Aluminum Silicate; Aluminum Starch Octenylsuccinate; Aluminum Stearate; Aluminum Subacetate; Aluminum Sulfate Anhydrous; Amerchol C; Amerchol-Cab; Aminomethylpropanol; Ammonia; Ammonia Solution; Ammonia Solution, Strong; Ammonium Acetate; Ammonium Hydroxide; Ammonium Lauryl Sulfate; Ammonium Nonoxynol-4 Sulfate; Ammonium Salt Of C-12-C-15 Linear Primary Alcohol Ethoxylate; Ammonium Sulfate; Ammonyx; Amphoteric-2; Amphoteric-9; Anethole; Anhydrous Citric Acid; Anhydrous Dextrose; Anhydrous Lactose; Anhydrous Trisodium Citrate; Aniseed Oil; Anoxid Sbn; Antifoam; Antipyrine; Apaflurane; Apricot Kernel Oil Pea-6 Esters; Aquaphor; Arginine; Arlacel; Ascorbic Acid; Ascorbyl Palmitate; Aspartic Acid; Balsam Peru; Barium Sulfate; Beeswax; Beeswax, Synthetic; Beheneth-10; Bentonite; Benzalkonium Chloride; Benzenesulfonic Acid; Benzethonium Chloride; Benzododecinium Bromide; Benzoic Acid; Benzyl Alcohol; Benzyl Benzoate; Benzyl Chloride; Betadex; Bibapcitide; Bismuth Subgallate; Boric Acid; Brocrinat; Butane; Butyl Alcohol; Butyl Ester Of Vinyl Methyl Ether/Maleic Anhydride Copolymer (125000 Mw); Butyl Stearate; Butylated Hydroxyanisole; Butylated Hydroxytoluene; Butylene Glycol; Butylparaben; Butyric Acid; C20-40 Pareth-24; Caffeine; Calcium; Calcium Carbonate; Calcium Chloride; Calcium Gluceptate; Calcium Hydroxide; Calcium Lactate; Calcobutrol; Caldiamide Sodium; Caloxetate Trisodium; Calteridol Calcium; Canada Balsam; Caprylic/Capric. Triglyceride; Captylic/Capric/Stearic Triglyceride; Captan; Captisol; Caramel; Carbomer 1342; Carbomer 1382; Carbomer 934; Carbomer 934p; Carbomer 940; Carbomer 941; Carbomer 980; Carbomer 981; Carbomer Homopolymer Type B (Allyl Pentaerythritol Crosslinked); Carbomer Homopolymer Type C (Allyl Pentaerythritol Crosslinked); Carbon Dioxide; Carboxy Vinyl Copolymer; Carboxymethylcellulose; Carboxymethylcellulose Sodium; Carboxypolymethylene; Carrageenan; Carrageenan Salt; Castor Oil; Cedar Leaf Oil; Cellulose; Cellulose, Microcrystalline; Cerasynt-Se; Ceresin; Ceteareth-12; Ceteareth-15; Ceteareth-30; Cetearyl Alcohol/Ceteareth-20; Cetearyl Ethylhexanoate; Ceteth-10; Ceteth-2; Ceteth-20; Ceteth-23; Cetostearyl Alcohol; Cetrimonium Chloride; Cetyl Alcohol; Cetyl Esters Wax; Cetyl Palmitate; Cetylpyridinium Chloride; Chlorobutanol; Chlorobutanol Hemihydrate; Chlorobutanol, Anhydrous; Chlorocresol; Chloroxylenol; Cholesterol; Choleth; Choleth-24; Citrate; Citric Acid; Citric Acid Monohydrate; Citric Acid, Hydrous; Cocamide Ether Sulfate; Cocamine Oxide; Coco Betaine; Coco Diethanolamide; Coco Monoethanolamide; Cocoa Butter; Coco-Glycerides; Coconut Oil; Coconut Oil, Hydrogenated; Coconut Oil/Palm Kernel Oil Glycerides, Hydrogenated; Cocoyl Caprylocaprate; Cola Nitida Seed Extract; Collagen; Coloring Suspension; Corn Oil; Cottonseed Oil; Cream Base; Creatine; Creatinine; Cresol; Croscarmellose Sodium; Crospovidone; Cupric Sulfate; Cupric Sulfate Anhydrous; Cyclomethicone; Cyclomethicone/Dimethicone Copolyol; Cysteine; Cysteine Hydrochloride; Cysteine Hydrochloride Anhydrous; Cysteine, D1-; D&C Red No. 28; D&C Red No. 33; D&C Red No. 36; D&C Red No. 39; D&C Yellow No, 10; Dalfampridine; Daubert 1-5 Pestr (Matte) 164z; Decyl Methyl Sulfoxide; Dehydag Wax Sx; Dehydroacetic Acid; Dehymuls E; Denatonium Benzoate; Deoxycholic Acid; Dextran; Dextran 40; Dextrin; Dextrose; Dextrose Monohydrate; Dextrose Solution; Diatrizoic Acid; Diazolidinyl Urea; Dichlorobenzyl Alcohol; Dichlorodifluoromethane; Dichlorotetrafluoroethane; Diethanolamine; Diethyl Pyrocarbonate; Diethyl Sebacate; Diethylene Glycol Monoethyl Ether; Diethylhexyl Phthalate; Dihydroxyaluminum Aminoacetate; Diisopropanolamine; Diisopropyl Adipate; Diisopropyl Dilinoleate; Dimethicone 350; Dimethicone Copolyol; Dimethicone Mdx4-4210; Dimethicone Medical Fluid 360; Dimethyl Isosorbide; Dimethyl Sulfoxide; Dimethylarninoethyl Methacrylate-Butyl Methacrylate-Methyl Methacrylate Copolymer; Dimethyldioctadecylammonium Bentonite; Dimethylsiloxane/Methylvinylsiloxane Copolymer; Dinoseb Ammonium Salt; Dipalmitoylphosphatidylalycerol, D1-; Dipropylene. Glycol; Disodium Cocoamphodiacetate; Disodium Laureth Sulfosuccinate; Disodium Lauryl Sulfosuccinate; Disodium Sulfosalicylate; Disofenin; Divinylbenzene Styrene Copolymer; Dmdm Hydantoin; Docosanol; Docusate Sodium; Duro-Tak 280-2516; Duro-Tak 387-2516; Duro-Tak 80-1196; Duro-Tak 87-2070; Duro-Tak 87-2194; Duro-Tak 87-2287; Duro-Tak 87-2296; Duro-Tak 87-2888; Duro-Tak 87-2979; Edetate Calcium Disodium; Edetate Disodium; Edetate Disodium Anhydrous; Edetate Sodium; Edetic Acid; Egg Phospholipids; Entsufon; Entsufon Sodium; Epilactose; Epitetracycline Hydrochloride; Essence Bouquet 9200; Ethanolamine Hydrochloride; Ethyl Acetate; Ethyl Oleate; Ethylcelluloses; Ethylene Glycol; Ethylene Vinyl Acetate Copolymer; Ethylenediamine; Ethylenediamine Dihydrochlaride; Ethylene-Propylene Copolymer; Ethylene-Vinyl Acetate Copolymer (28% Vinyl Acetate); Ethylene-Vinyl Acetate Copolymer (9% Vinylacetate); Ethylhexyl Hydroxystearate; Ethylparaben; Eucalyptol; Exametazine; Fat, Edible; Fat, Hard; Fatty Acid Esters; Fatty Acid Pentaerythriol Ester; Fatty Acids; Fatty Alcohol Citrate; Fatty Alcohols; H&C Blue No. 1; Fd&C Green No. 3; Fd&C Red No. 4; Fd&C Red No. 40; Fd&C Yellow No. 10 (Delisted); Fd&.0 Yellow No. 5; Fd&C Yellow No. 6; Ferric Chloride; Ferric Oxide; Flavor 89-186; Flavor 89-259; Flavor Df-119; Flavor Df-1530; Flavor Enhancer; Flavor FIG. 827118; Flavor Raspberry Pfc-8407; Flavor Rhodia Pharmaceutical No. Rf 451; Fluorochlomhydrocarbons; Formaldehyde; Formaldehyde Solution; Fractionated Coconut Oil; Fragrance 3949-5; Fragrance 520a; Fragrance 6.007; Fragrance 91-122; Fragrance 9128-Y; Fragrance 93498g; Fragrance Balsam Pine No. 5124; Fragrance Bouquet 10328; Fragrance Chemodemi 6401-B; Fragrance Chemodemi 6411; Fragrance Cream No. 73457; Fragrance Cs-28197; Fragrance Felton 066m; Fragrance Firmenich 47373; Fragrance Givaudan Ess 9090/1c; Fragrance H-6540; Fragrance Herbal 10396; Fragrance Nj-1085; Fragrance P O F1-147; Fragrance Pa 52805; Fragrance Pera Denn D; Fragrance Rbd-9819; Fragrance Shaw Mudge U-7776; Fragrance Tf 044078; Fragrance Ungerer Honeysuckle K 2771; Fragrance Ungerer N5195; Fructose; Gadolinium Oxide; Galactose; Gamma Cyclodextrin; Gelatin; Gelatin, Crosslinked; Gelfoarn Sponge; Cellan Gum (Low Acyl); Gelva 737; Gentisic Acid; Gentisic Acid Ethanolamide; Gluceptate Sodium; Gluceptate Sodium Dihydrate; Gluconolactone; Glucuronic Acid; Glutamic Acid, D1-; Glutathione; Glycerin; Glycerol Ester Of Hydrogenated Rosin; Glyceryl Citrate; Glyceryl Isostearate; Glyceryl Laurate; Glyceryl Monostearate; Glyceryl Oleate; Glyceryl Oleate/Propylene Glycol; Glyceryl Palmitate; Glyceryl Ricinoleate; Glyceryl Stearate; Glyceryl Stearate-Laureth-23; Glyceryl Stearate/Peg Stearate; Glyceryl Stearate/Peg-100 Stearate; Glyceryl Stearate/Peg-40 Stearate; Glyceryl Stearate-Stearamidoethyl Diethylamine; Glyceryl Trioleate; Glycine; Glycine Hydrochloride; Glycol Distearate; Glycol Stearate; Guanidine Hydrochloride; Guar Gum; Hair Conditioner (18n195-1m); Heptane; Hetastarch; Hexylene Glycol; High Density Polyethylene; Histidine; Human Albumin Microspheres; Hyaluronate Sodium; Hydrocarbon; Hydrocarbon Gel, Plasticized; Hydrochloric Acid; Hydrochloric Acid, Diluted; Hydrocortisone; Hydrogel Polymer; Hydrogen Peroxide; Hydrogenated Castor Oil; Hydrogenated Palm Oil; Hydrogenated Palm./Palm Kernel Oil. Peg-6 Esters; Hydrogenated Polybutene 635-690; Hydroxide Ion; Hydroxyethyl Cellulose; Hydroxyethylpiperazine Ethane Sulfonic Acid; Hydroxymethyl Cellulose; Hydroxyoctacosanyl Hydroxystearate; Hydroxypropyl Cellulose; Hydroxypropyl Methylcellulose 2906; Hydroxypropyl-Beta-cyclodextrin; Hypromellose 2208 (15000 Mpa.S); Hypromellose 2910 (15000 Mpa.S); Hypromelloses; Imidurea; Iodine; Todoxamic Acid; Iofetamine Hydrochloride; Irish Moss Extract; Isobutane; Isoceteth-20; Isoleucine; Isooctyl Acrylate; Isopropyl Alcohol; Isopropyl Isostearate; Isopropyl Myristate; Isopropyl Myristate—Myristyl Alcohol; Isopropyl Palmitate; Isopropyl Stearate; isostearic Acid; isostearyl Alcohol; Isotonic Sodium Chloride Solution; Jelene; Kaolin; Kathon Cg; Kathon Cg II; Lactate; Lactic Acid; Lactic Acid, DI-; Lactic Acid, L-; Lactohionic Acid; Lactose; Lactose Monohydrate; Lactose, Hydrous; Laneth; Lanolin; Lanolin Alcohol—Mineral Oil; Lanolin Alcohols; Lanolin Anhydrous; Lanolin Cholesterols; Lanolin Nonionic Derivatives; Lanolin, Ethoxylated; Lanolin, Hydrogenated; Lauralkonium Chloride; Lauramine Oxide; Laurdirnonium Hydrolyzed Animal Collagen; Laureth Sulfate; Laureth-2; Laureth-23; Laureth-4; Laurie Diethanolamide; Laurie Myristic Diethanolamide; Lattroyl Sarcosine; Lauryl Lactate; Lauryl Sulfate; Lavandula Angustifolia Flowering Top; Lecithin; Lecithin Unblea.ched; Lecithin, Egg; Lecithin, Hydrogenated; Lecithin, Hydrogenated Soy; Lecithin, Soybean; Lemon Oil; Leucine; Levulinic Acid; Lidofenin; Light Mineral Oil; Light Mineral Oil (85 Ssu); Limonene, (+1-)-; Lipocol Sc-15; Lysine; Lysine Acetate; Lysine Monohydrate; Magnesium Aluminum Silicate; Magnesium Aluminum Silicate Hydrate; Magnesium Chloride; Magnesium Nitrate; Magnesium Stearate; Maleic Acid; Mannitol; Maprofix; Mebrofenin; Medical Adhesive Modified S-15; Medical Antifonn A-F Emulsion; Medronate Disodium; Medronic Acid; Meglumine; Menthol; Metacresol; Metaphosphoric Acid; Methanesulfonic Acid; Methionine; Methyl Alcohol; Methyl Gluceth-10; Methyl Gluceth-20; Methyl Gluceth-20 Sesquistearate; Methyl Glucose Sesquistearate; Methyl Laurate; Methyl Pyrrolidone; Methyl Salicylate; Methyl Stearate; Methylboronic Acid; Methylcellulose (4000 Mpa.S); Mahylcelluloses; Methylchloroisothiazolinone; Methylene Blue; Methylisothiazolinone; Methylparaben; Microcrystalline Wax, Mineral Oil; Mono And Dialyceride; Monostearyl Citrate; Monothioglycerol; Multisterol Extract; Myristyl Alcohol; Myristyl Lactate; Myristyl-Gamma-Picolinium Chloride; N-(Carbamoyl-Methoxy Peg-40)-1,2-Distearoyl-Cephalin Sodium; N,N-Dimethylacetatnide; Niacinamide; Nioxime; Nitric Acid; Nitrogen; Nonoxynol Iodine; _Nonoxynol-15; Nonoxynol-9; Norflurane; Oatmeal; Octadecene-1/Maleic Acid Copolymer; Octanoic Acid; Octisalate; Octoxynol-1; Octoxynol-40; Octoxynol-9; Octyldodecanol; Octylphenol Polymethylene; Oleic Acid; Oleth-10/Oleth-5; Oleth-2; Oleth-20; Oleyl Alcohol; Oleyl Oleate; Olive Oil; Oxidronate Disodium; Oxyquinoline; Palm Kernel Oil; Palmitamine Oxide; Parabens; Paraffin; Paraffin, White Soft; Paifum Creme 45/3; Peanut Oil; Peanut Oil, Refined; Pectin; Peg 6-32 Stearate/Glycol Stearate; Peg Vegetable Oil; Peg-100 Stearate; Peg-12 Glyceryl Laurate; Peg-120 Glyceryl Stearate; Peg-120 Methyl Glucose Dioleate; Peg-15 Cocamine; Peg-150 Distearate; Peg-2 Stearate; Peg-20 Sorbitan Isostearate; Pea-22 Methyl Ether/Dodecyl Glycol Copolymer; Peg-25 Propylene Glycol Stearate; Peg-4 Dilaurate; Peg-4 Laurate; Peg-40 Castor Oil; Peg-40 Sorbitan Diisostearate; Peg-45/Dodecyl Glycol Copolymer; Peg-5 Oleate; Peg-50 Stearate; Peg-54 Hydrogenated Castor Oil; Peg-6 Isostearate; Peg-60 Castor Oil; Peg-60 Hydrogenated Castor Oil; Peg-7 Methyl Ether; Peg-75 Lanolin; Peg-8 Laurate; Peg-8 Stearate; Pegoxol 7 Stearate; Pentadecalactone; Pentaerythritol Cocoate; Pentasodium Pentetate; Pentetate Calcium Trisodium; Pentetic Acid; Peppermint Oil; Perflutren; Perfume 25677; Perfume Bouquet; Perfume E-1991; Perfume Gd 5604; Perfume Tana 90/42 Scba; Perfume W-1952-1; Petrolatum; Petrolatum, White; Petroleum Distillates; Phenol; Phenol, Liquefied; Phenonip; Phenoxyethanol; Phenylalanine; Phenylethyl Alcohol; Phenylmercuric Acetate; Phenylmercuric Nitrate; Phosphatidyl Glycerol, Egg; Phospholipid; Phospholipid, Egg; Phospholipon 90g; Phosphoric Acid; Pine Needle Oil (Pinus Sylvestris); Piperazine Hexahydrate; Pla.stibase-50w; Polacrilin; Polidronium Chloride; Poloxamer 124; Poloxamer 181; Poloxamer 182; Poloxamer 188; Poloxamer 237; .Poloxamer 407; Poly(Bis(P-Carboxyphenoxy)Propane Anhydride): Sebacic Acid; Poly(Dimethylsiloxane/Methylvinylsiloxane/Methylhydrogensiloxane) Dimethylvinyl Or Dimethylhydroxy Or Trimethyl Endblocked; Poly(D1-Lactic-Co-Glycolic Acid), (50:50; Poly(DI-Lactic-Co-Glycolic Acid), Ethyl Ester Terminated, (50:50; Polyacrylic Acid (250000 Mw); Polybutene (1400 Mw); Polycarbophil; Polyester; Polyester Polyamine Copolymer; Polyester Rayon; Polyethylene Glycol 1000; Polyethylene Glycol 1450; Polyethylene Glycol 1500; Polyethylene Glycol 1540; Polyethylene Glycol 200; Polyethylene Glycol 300; Polyethylene Glycol 300-1600; Polyethylene Glycol 3350; Polyethylene Glycol 400; Polyethylene Glycol 4000; Polyethylene Glycol 540; Polyethylene Glycol 600; Polyethylene Glycol 6000; Polyethylene Glycol 8000; Polyethylene Glycol 900; Polyethylene High Density Containing Ferric Oxide Black (<1%); Polyethylene Low Density Containing Barium Sulfate (20-24%); Polyethylene T; Polyethylene Terephthalates; Polyalactin; Polyglyceryl-3 Oleate; Polyglyceryl-4 Oleate; Polyhydroxyethyl Methacrylate; Polyisobutylene; Polyisobutylene (1100000 Mw); Polyisobutylene (35000 Mw); Polyisobutylene 178-236; Polyisobutylene 241-294; Polyisobutylene 35-39; Polyisobutylene Low Molecular Weight; Polyisobutylene Medium Molecular Weight; Polyisobutylene/Polybutene Adhesive; Polylactide; Polyols; Polyoxyethylene-Polyoxypropylene 1800; Polyoxyethylene Alcohols; Polyoxyethylene Fatty Acid Esters; Polyoxyethylene Propylene; Polyoxyl 20 Cetostearyl Ether; Polyoxyl 35 Castor Oil; Polyoxyl 40 Hydrogenated Castor Oil; Polyoxyl 40 Stearate; Polyoxyl 400 Stearate; Polyoxyl 6 And Polyoxyl 32 Palmitostearate; Polyoxi,71Distearate; Polyoxyl Glyceryl Stearate; Polyoxyl Lanolin; Polyoxyl Palmitate; Polyoxyl Stearate; Polypropylene; Polypropylene Glycol; Polyquatemium-10; Polyquatemium-7 (70/30 Acrylamide/Dadmac; Polysiloxane; Polysorbate 20; Polysorbate 40; Polysorbate 60; Polysorbate 65, Polysorbate 80; Polyurethane; Polyvinyl Acetate; Polyvinyl Alcohol; Polyvinyl Chloride; Polyvinyl Chloride-Polyvinyl Acetate Copolymer; Polyvinylpyridine; Poppy Seed Oil; Potash; Potassium Acetate; Potassium Alum; Potassium Bicarbonate, Potassium Bisuifite; Potassium Chloride; Potassium Citrate; Potassium Hydroxide; Potassium Metabisulfite; Potassium Phosphate, Dibasic; Potassium Phosphate, Monobasic; Potassium Soap; Potassium Sorhate; Povidone Acrylate Copolymer; Povidone Hydrogel; Povidone K17; Povidone K25; Povidone K29/32; Povidone K30; Povidone K90; Povidone K90f, Povidone/Eicosene Copolymer, Povidones; Ppg-12/Smdi Copolymer; Ppg-15 Stearyl Ether; Ppg-20 Methyl Glucose Ether Distearate; Ppg-26 Oleate; Product Wat; Proline; Promulgen D; PramIgen G; Propane; Propellant A-46; Propyl Gallate; Propylene Carbonate; Propylene Glycol; Propylene Glycol Diacetate; Propylene Glycol Dicaprylate; Propylene Glycol Monolaurate; Propylene Glycol Monopalmitostearate; Propylene Glycol Palmitostearate; Propylene Glycol Ricinoleate; Propylene Glycol/Diazolidinyl; Urea/Methylpaniben/Propylparben; Propylparaben; Protamine Sulfate; Protein Hydrolysate; Pvin/Ma Copolymer; Quatemium-15; Quaternium-15 Cis-Form; Quatemium-52; Ra-2397; Ra-3011; Saccharin; Saccharin Sodium; Saccharin Sodium Anhydrous; Safflower Oil; Sd Alcohol 3a; Sd Alcohol 40; Sd Alcohol 40-2; Sd Alcohol 40b; Sepineo P 600; Serine, Sesame Oil; Shea Butter; Silastic Brand Medical Grade Tubing; Silastic Medical Adhesive,Silicone Type A; Silica, Dental; Silicon; Silicon Dioxide; Silicon Dioxide, Colloidal; Silicone; Silicone Adhesive 4102; Silicone Adhesive 4502; Silicone Adhesive Bio-Psa Q7-4201; Silicone Adhesive Bio-Psa Q7-4301; Silicone Emulsion; Silicone/Polyester Film Strip; Simethicone; Simethicone Emulsion; Sipon Ls 20np; Soda Ash; Sodium Acetate; Sodium Acetate Anhydrous; Sodium Alkyl Sulfate; Sodium Ascorbate; Sodium Benzoate; Sodium Bicarbonate; Sodium Bisulfate; Sodium Bisulfite; Sodium Borate; Sodium Borate Decahydrate; Sodium Carbonate; Sodium Carbonate Decahydrate; Sodium Carbonate Monohydrate; Sodium Cetostearyl Sulfate; Sodium Chlorate; Sodium Chloride; Sodium Chloride Injection; Sodium Chloride Injection, Bacteriostatic; Sodium Cholesteryl Sulfate; Sodium Citrate; Sodium Cocoyl Sarcosinate; Sodium Desoxycholate; Sodium Dithionite; Sodium Dodecylbenzenesulfonate; Sodium Formaldehyde Sulfoxylate; Sodium Gluconate; Sodium Hydroxide; Sodium Hypochlorite; Sodium Iodide; Sodium Lactate; Sodium Lactate, L-; Sodium Laureth-2 Sulfate; Sodium Laureth-3 Sulfate; Sodium Laureth-5 Sulfate; Sodium Lauroyl Sarcosinate; Sodium Lauryl Sulfate; Sodium Lauryl Sulfoacetate; Sodium Metabisulfite; Sodium Nitrate; Sodium Phosphate; Sodium Phosphate Dihydrate; Sodium Phosphate, Dibasic; Sodium Phosphate, Dibasic, Anhydrous; Sodium Phosphate, Dibasic, Dihydrate; Sodium Phosphate, Dibasic, Dodecahydrate; Sodium Phosphate, Dibasic, Heptahydrate; Sodium Phosphate, Monobasic; Sodium Phosphate, Monobasic, Anhydrous; Sodium Phosphate, Monobasic, Dihydrate; Sodium Phosphate, Monobasic, Monohydrate; Sodium Polyacrylate (2500000 Mw); Sodium Pyrophosphate; Sodium Pyrrolidone Carboxylate; Sodium Starch Glycolate; Sodium Succinate Hexahydrate; Sodium Sulfate; Sodium Sulfate Anhydrous; Sodium Sulfate Decahydrate; Sodium Sulfite; Sodium Sulfosuccinated UndecycleniclYlonoalkylolamide; Sodium Tartrate; Sodium Thioglycolate; Sodium Thiomalate; Sodium Thiosulfate; Sodium Thiosulfate Anhydrous; Sodium Trimetaphosphate; Sodium Xylenesulfonate; Somay 44; Sorbic Acid; Sorbitan; Sorbitan Isostearate; SorbitanlYlonolaurate; SorbitanlYlonooleate; Sorbitan Monopalmitate; Sorbitan Monostearate; Sorbitan Sesquioleate; Sorbitan Trioleate; Sorbitan Tristearate; Sorbitol; Sorbitol Solution; Soybean Flour; Soybean Oil; Spearmint Oil; Spermaceti; Squalene; Stabilized Oxychloro Complex; Stannous 2-Ethylhexanoate; Stannous Chloride; Stannous Chloride Anhydrous; Stannous Fluoride; Stannous Tartrate; Starch; Starch 1500, Pregelatinized; Starch, Corn; Stearalkonium Chloride; Stearalkonium Hectorite/Propylene Carbonate; Stearamidoethyl Diethylamine; Steareth-10; Steareth-100; Steareth-2; Steareth-20; Steareth-2I; Steareth-40; Stearic. Acid; Stearic Diethanolamide; Stearoxytrimethylsilane; Steartrimonium Hydrolyzed Animal Collagen; Stearyl Alcohol; Sterile Water For Inhalation; Styrene/Isoprene/Styrene Block Copolymer; Succimer; Succinic Acid; Sucralose; Sucrose; Sucrose Distearate; Sucrose Polyesters; Sulfacetamide Sodium; Sulfobutylether .Beta.-Cyclodextrin; Sulfur Dioxide; Sulfuric Acid; Sulfurous Acid; Surfactol Qs; Tagatose, D-; Talc; Tall Oil; Tallow Glycerides; Tartaric Acid; Tartaric Acid, D1-; Tenox; Tenox-2; Tert-Butyl Alcohol; Tert-Butyl Hydroperoxide; Tert-Butylhydroquinone; Tetrakis(2-Methoxvisobutylisocyanide)Copper(i) Tetrafluoroborate; Tetrapropyl Orthosilicate; Tetrofosmin; Theophylline; Thimerosal; Threonine; Thymol; Tin; Titanium Dioxide; Tocopherol; Tocophersolan; Total parenteral nutrition, lipid emulsion; Triacetin; Tricaprylin; Trichloromonofluoromethane; Trideceth-10; Triethanolamine Lauryl Sulfate; Trifluoroacetic Acid; Triglycerides, Medium Chain; Trihydroxystearin; Trilaneth-4 Phosphate; Trilaureth-4 Phosphate; Trisodiwn Citrate Dihydrate; Trisodium Hedta; Triton 720; Triton X-200; Trolamine; Tromantadine; Tromethamine (TRIS); Tryptophan; Tyloxapol; Tyrosine; Undecylenic Acid; Union 76 Amsco-Res 6038; Urea; Valine; Vegetable Oil; Vegetable Oil Glyceride, Hydrogenated; Vegetable Oil, Hydrogenated; Versetamide; Viscarin; Viscose/Cotton; Vitamin E; Wax, Emulsifying; Wecobee Fs; White Ceresin Wax; White Wax; Xanthan Gum; Zinc; Zinc Acetate; Zinc Carbonate; Zinc Chloride; and Zinc Oxide.

[0636] Pharmaceutical formulations of AAV particles disclosed herein may comprise cations or anions. In certain embodiments, the formulations comprise metal cations such as, but not limited to, Zn²⁺, Ca²⁺, Cu²⁺, Mn²⁺, Mg⁺ and combinations thereof. As a non-limiting example, formulations may comprise polymers and complexes with a metal cation (See e.g., U.S. Pat. Nos. 6,265,389 and 6,555,525, each of which is herein incorporated by reference in its entirety).

[0637] Formulations of the present disclosure may also comprise one or more pharmaceutically acceptable salts. As used herein, “pharmaceutically acceptable salts” refers to derivatives of the disclosed compounds wherein the parent compound is modified by converting an existing acid or base moiety to its salt form (e.g., by reacting the free base group with a suitable organic acid).

[0638] In certain embodiments, additional excipients that may be used in formulating the pharmaceutical composition may comprise magnesium chloride (MgCl₂), arginine, sorbitol, and/or trehalose.

[0639] Formulations of the present disclosure may comprise at least one excipient and/or diluent in addition to the AAV particle. The formulation may comprise 1, 2, 3, 4, 5, 6, 7, 8, 9, 10, or more than 10 excipients and/or diluents in addition to the AAV particle.

[0640] In certain embodiments, the formulation may comprise, but is not limited to, phosphate-buffered saline (PBS). As a non-limiting example, the PBS may comprise sodium chloride, potassium chloride, disodium phosphate, monopotassium phosphate, and distilled water. In some instances, the PBS does not contain potassium or magnesium. In other instances, the PBS contains calcium and magnesium.

### Sodium Phosphate

[0641] In certain embodiments, at least one of the components in the formulation is sodium phosphate. The formulation may comprise monobasic, dibasic or a combination of both monobasic and dibasic sodium phosphate.

[0642] In certain embodiments, the concentration of sodium phosphate in a formulation may be, but is not limited to, 0.1 mM, 0.2 mM, 0.3 mM, 0.4 mM, 0.5 mM, 0.6 mM, 0.7 mM, 0.8 mM, 0.9 mM, 1 mM, 1.1 mM, 1.2 mM, 1.3 mM, 1.4 mM, 1.5 mM, 1.6 mM, 1.7 mM, 1.8 mM, 1.9 mM, 2 mM, 2.1 mM, 2.2 mM, 2.3 mM, 2.4 mM, 2.5 mM, 2.6 mM, 2.7 mM, 2.8 mM, 2.9 mM, 3 mM, 3.1 mM, 3.2 mM, 3.3 mM, 3.4 mM, 3.5 mM, 3.6 mM, 3.7 mM, 3.8 mM, 3.9 mM, 4 mM, 4.1 mM, 4.2 mM, 4.3 mM, 4.4 mM, 4.5 mM, 4.6 mM, 4.7 mM, 4.8 mM, 4.9 mM, 5 mM, 5.1 mM, 5.2 mM, 5.3 mM, 5.4 mM, 5.5 mM, 5.6 mM, 5.7 mM, 5.8 mM, 5.9 mM, 6 mM, 6.1 mM, 6.2 mM, 6.3 mM, 6.4 mM, 6.5 mM, 6.6 mM, 6.7 mM, 6.8 mM, 6.9 mM, 7 mM, 7.1 mM, 7.2 mM, 7.3 mM, 7.4 mM, 7.5 mM, 7.6 mM, 7.7 mM, 7.8 mM, 7.9 mM, 8 mM, 8.1 mM, 8.2 mM, 8.3 mM, 8.4 mM, 8.5 mM, 8.6 mM, 8.7 mM, 8.8 mM, 8.9 mM, 9 mM, 9.1 mM, 9.2 mM, 9.3 mM, 9.4 mM, 9.5 mM, 9.6 mM, 9.7 mM, 9.8 mM, 9.9 mM, 10 mM, 10.1 mM, 10.2 mM, 10.3 mM, 10.4 mM, 10.5 mM, 10,6 mM. 10.7 mM, 10.8 mM, 10.9 mM, 11 mM, 11.1 mM, 11.2 mM, 11.3 mM, 11.4 mM, 11.5 mM, 11.6 mM, 11.7 mM, 11.8 mM, 11.9 mM, 12 mM, 12.1 mM, 12.2 mM, 12.3 mM, 12.4 mM, 12.5 mM, 12,6 mM, 12.7 mM, 12.8 mM, 12.9 mM, 13 mM, 13.1 mM, 13.2 mM, 13.3 mM, 13.4 mM, 13.5 mM, 13.6 mM, 13.7 mM, 13.8 mM, 13.9 mM, 14 mM, 14.1 mM, 14.2 mM, 14.3 mM, 14.4 mM, 14.5 mM, 14.6 mM, 14.7 mM, 14.8 mM, 14.9 mM or 15 mM.

[0643] The formulation may comprise sodium phosphate in a range of 0-0.5 mM, 0.1-0.6 mM, 0.2-0.7 mM, 0.3-0.8 mM, 0.4-0.9 mM, 0.5-1 mM, 0.6-1.1 mM, 0.7-1.2 mM, 0.8-1.3 mM, 0.9-1.4 mM, 1-1.5 mM, 1.1-1.6 mM, 1.2-1.7 mM, 1.3-1.8 mM, 1.4-1.9 mM, 1.5-2 mM, 1.6-2.1 mM, 1.7-2.2 mM, 1.8-2.3 mM, 1.9-2.4 mM, 2-2.5 mM, 2.1-2.6 mM, 2.2-2.7 mM, 2.3-2.8 mM, 2.4-2.9 mM, 2.5-3 mM, 2.6-3.1 mM, 2.7-3.2 mM, 2.8-3.3 mM, 2.9-3.4 mM, 3-3.5 mM, 3.1-3.6 mM, 3.2-3.7 mM, 3.3-3.8 mM, 3.4-3.9 mM, 3.5-4 mM, 3.6-4.1 mM, 3.7-4.2 mM, 3.8-4.3 mM, 3.9-4.4 mM, 4-4.5 mM, 4.1-4.6 mM, 4.2-4.7 mM, 4.3-4.8 mM, 4.4-4.9 mM, 4.5-5 mM, 4.6-5.1 mM, 4.7-5.2 mM, 4.8-5.3 mM, 4.9-5.4 mM, 5-5.5 mM, 5.1-5.6 mM, 5.2-5.7 mM, 5.3-5.8 mM, 5.4-5.9 mM, 5.5-6 mM, 5.6-6.1 mM, 5.7-6.2 mM, 5.8-6.3 mM, 5.9-6.4 mM, 6-6.5 mM, 6.1-6.6 mM, 6.2-6.7 mM, 6.3-6.8 mM, 6.4-6.9 mM, 6.5-7 mM, 6.6-7.1 mM, 6.7-7.2 mM, 6.8-7.3 mM, 6.9-7.4 mM, 7-7.5 mM, 7.1-7.6 mM, 7.2-7.7 moi, 7.3-7.8 mM, 7.4-7.9 mM, 7.5-8 mM, 7.6-8.1 mM, 7.7-8.2 mM, 7.8-8.3 mM, 7.9-8.4 mM, 8-8.5 mM, 8.1-8.6 mM, 8.2-8.7 mM, 8.3-8.8 mM, 8.4-8.9 mM, 8.5-9 mM. 8.6-9.1 mM, 8.7-9.2 mM, 8,8-9.3 mM, 89-9.4 mM, 9-9.5 mM, 9.1-9.6 mM, 9.2-9.7 mM, 9.3-9.8 mM, 9.4-9.9 mM, 9.5-10 mM, 9.6-10.1 mM, 9.7-10.2 mM, 9.8-10.3 mM, 9.9-10.4 mM, 10-10.5 mM, 10.1-10.6 mM, 10.2-10.7 mM, 10.3-10.8 mM, 10.4-10.9 mM, 10.5-11 mM, 10.6-11.1 mM, 10.7-11.2 mM, 10.8-11.3 mM, 10.9-11.4 mM, 11-11.5 mM, 11.1-11.6 mM, 11.2-11.7 mM, 11.3-11.8 mM, 11.4-11.9 mM, 11.5-12 mM, 11.6-12.1 mM, 11.7-12.2 mM, 11.8-12.3 mM, 11.9-12.4 mM, 12-12.5 mM, 12.1-12.6 mM, 12.2-12.7 mM, 12.3-12.8 mM, 12.4-12.9 mM, 12.5-13 mM, 12.6-13.1 mM, 12.7-13.2 mM, 12.8-13.3 mM, 12.9-13.4 mM, 13-13.5 mM, 13.1-13.6 mM, 13.2-13.7 mM, 13.3-13.8 mM, 13.4-13.9 mM, 13.5-14 mM, 13.6-14.1 mM, 13.7-14.2 mM, 13.8-14.3 mM, 13.9-14.4 mM, 14-14.5 mM, 14.1-14.6 mM, 14.2-14.7 mM, 14.3-14.8 mM, 14.4-14.9 mM, 14.5-15 mM, 0-1 mM, 1-2 mM, 2-3 mM, 3-4 mM, 4-5 mM, 5-6 mM, 6-7 mM, 7-8 mM, 8-9 mM, 9-10 mM, 10-11 mM, 11-12 mM, 12-13 mM, 13-14 mM, 14-15 mM, 15-16 mM, 0-2 mM, 1-3 mM, 2-4 mM, 3-5 mM, 4-6 mM, 5-7 mM, 6-8 mM, 7-9 mM, 8-10 mM, 9-11 mM, 10-12 mM, 11-13 mM, 12-14 mM, 13-15 mM, 0-3 mM, 1-4 mM, 2-5 mM, 3-6 mM, 4-7 mM, 5-8 mM, 6-9 mM, 7-10 mM, 8-11 mM, 9-12 mM, 10-13 mM, 11-14 mM, 12-15 mM, 0-4 mM, 1-5 mM, 2-6 mM, 3-7 mM, 4-8 mM, 5-9 mM, 6-10 mM, 7-11 mM, 8-12 mM, 9-13 mM, 10-14 mM, 11-15 mM, 0-5 mM, 1-6 mM, 2-7 mM, 3-8 mM, 4-9 mM, 5-10 mM, 6-11 mM, 7-12 mM, 8-13 mM, 9-14 mM, 10-15 mM, 0-6 mM, 1-7 mM, 2-8 mM, 3-9 mM, 4-10 mM, 5-11 mM, 6-12 mM. 7-13 mM, 8-14 mM, 9-15 mM, 0-7 mM, 1-8 mM, 2-9 mM, 3-10 mM, 4-11 mM, 5-12 mM, 6-13 mM, 7-14 mM, 8-15 mM, 0-8 mM, 1-9 mM, 2-10 mM, 3-11 mM, 4-12 mM, 5-13 mM, 6-14 mM, 7-15 mM, 0-9 mM, 1-10 mM, 2-11 mM, 3-12 mM 4-13 mM, 5-14 mM, 6-15 mM, 0-10 mM, 1-11 mM, 2-12 mM, 3-13 mM, 4-14 mM, 5-15 mM, 0-11 mM, 1-12 mM, 2-13 mM, 3-14 mM, 4-15 mM, 0-12 mM, 1-13 mM, 2-14 mM, 3-15 mM, 0-13 mM, 1-14 mM, 2-15 mM, 0-14 mM, 1-15 mM, or 0-15 mM.

[0644] In certain embodiments, the formulation may comprise 0-10 mM of sodium phosphate.

[0645] In certain embodiments, the formulation may comprise 2-12 mM of sodium phosphate.

[0646] In certain embodiments, the formulation may comprise 2-3 mM of sodium phosphate.

[0647] In certain embodiments, the formulation may comprise 9-10 mM of sodium phosphate.

[0648] In certain embodiments, the formulation may comprise 10-11 mM of sodium phosphate.

[0649] In certain embodiments, the formulation may comprise 2.7 mM of sodium phosphate.

[0650] In certain embodiments, the formulation may comprise 10 mM of sodium phosphate,

### Potassium Phosphate

[0651] In certain embodiments, at least one of the components in the formulation is potassium phosphate. The formulation may comprise monobasic, dibasic or a combination of both monobasic and dibasic potassium phosphate.

[0652] In certain embodiments, the concentration of potassium phosphate in a formulation may be, but is not limited to, 0.1 mM, 0.2 mM, 0.3 mM, 0.4 mM, 0.5 mM, 0.6 mM, 0.7 mM, 0.8 mM, 0.9 mM, 1 mM, 1.1 mM, 1.2 mM, 1.3 mM, 1.4 mM, 1.5 mM, 1.6 mM, 1.7 mM, 1.8 mM, 1.9 mM, 2 mM, 2.1 mM, 2.2 mM, 2.3 mM, 2.4 mM, 2.5 mM, 2.6 mM, 2.7 mM, 2.8 mM, 2.9 mM, 3 mM, 3.1 mM, 3.2 mM, 3.3 mM, 3.4 mM, 3.5 mM, 3.6 mM, 3.7 mM, 3.8 mM, 3.9 mM, 4 mM, 4.1 mM, 4.2 mM, 4.3 mM, 4.4 mM, 4.5 mM, 4.6 mM, 4.7 mM, 4.8 mM, 4.9 mM, 5 mM, 5.1 mM, 5.2 mM, 5.3 mM, 5.4 mM, 5.5 mM, 5.6 mM, 5.7 mM, 5.8 mM, 5.9 mM, 6 mM, 6.1 mM, 6.2 mM, 6.3 mM, 6.4 mM, 6.5 mM, 6.6 mM, 6.7 mM, 6.8 mM, 6.9 mM, 7 mM, 7.1 mM, 7.2 mM, 7.3 mM, 7.4 mM, 7.5 mM, 7.6 mM, 7.7 mM, 7.8 mM, 7.9 mM, 8 mM, 8.1 mM, 8.2 mM, 8.3 mM, 8.4 mM, 8.5 mM, 8.6 mM, 8.7 mM, 8.8 mM, 8.9 mM, 9 mM, 9.1 mM, 9.2 mM, 9.3 mM, 9.4 mM, 9.5 mM, 9.6 mM, 9.7 mM, 9.8 mM, 9.9 mM, 10 mM, 10.1 mM, 10.2 mM, 10.3 mM, 10.4 mM, 10.5 mM, 10.6 mM, 10.7 mM, 10.8 mM, 10.9 mM, 11 mM, 11.1 mM, 11.2 mM, 11.3 mM, 11.4 mM, 11.5 mM, 11.6 mM, 11.7 mM, 11.8 mM, 11.9 mM, 12 mM, 12.1 mM, 12.2 mM, 12.3 mM, 12.4 mM, 12.5 mM, 12.6 mM, 12.7 mM, 12.8 mM, 12.9 mM, 13 mM, 13.1 mM, 13.2 mM, 13.3 mM, 13.4 mM, 13.5 mM, 13.6 mM, 13.7 mM, 13.8 mM, 13.9 mM, 14 mM, 14.1 mM, 14.2 mM, 14.3 mM, 14.4 mM, 14.5 mM, 14.6 mM, 14.7 mM, 14.8 mM, 14.9 mM or 15 mM.

[0653] The formulation may comprise potassium phosphate in a range of 0-0.5 mM, 0.1-0.6 mM, 0.2-0.7 mM, 0.3-0.8 mM, 0.4-0.9 mM, 0.5-1 mM, 0.6-1.1 mM, 0.7-1.2 mM, 0.8-1.3 mM, 0.9-1.4 mM, 1-1.5 mM, 1.1-1.6 mM, 1.2-1.7 mM, 1.3-1.8 mM, 1.4-1.9 mM, 1.5-2 mM, 1.6-2.1 mM, 1.7-2.2 mM, 1.8-2.3 mM, 1.9-2.4 mM, 2-2.5 mM, 2.1-2.6 mM, 2.2-2.7 mM, 2.8 mM, 2.4-2.9 mM, 2.5-3 mM, 2.6-3.1 mM, 2.7-3.2 mM, 2.8-3.3 mM, 2.9-3.4 mM, 3-3.5 mM, 3.1-3.6 mM, 3.2-3.7 mM, 3.3-3.8 mM, 3.4-3.9 mM, 3.5-4 mM, 3.6-4.1 mM, 3.7-4.2 mM, 3.8-4.3 mM, 3.9-4.4 mM, 4-4.5 mM, 4.1-4.6 mM, 4.2-4.7 mM, 4.3-4.8 mM, 4.4-4.9 mM, 4.5-5 mM, 4.6-5.1 mM, 4.7-5.2 mM, 4.8-5.3 mM, 4.9-5.4 mM, 5-5.5 mM, mM, mM, 5.3-5.8 mM, 5.4-5.9 mM, 5.5-6 mM. 5.6-6.1 mM, 5.7-6.2 mM, 5.8-6.3 mM, 5.9-6.4 mM, 6-6.5 mM, 6.1-6.6 mM, 6.2-6.7 mM, 6.3-6.8 mM, 6.4-6.9 mM, 6.5-7 mM, 6.6-7.1 mM, 6.7-7.2 mM, 6.8-7.3 mM, 6.9-7.4 mM, 7-7.5 mM, 7.1-7.6 mM, 7.2-7.7 mM, 7.3-7.8 mM, 7.4-7.9 mM, 7.5-8 mM, 7.6-8.1 mM, 7.7-8.2 mM, 7.8-8.3 mM, 7.9-8.4 mM, 8-8.5 mM, 8.1-8.6 mM, 8.2-8.7 mM, 8.3-8.8 mM, 8.4-8.9 mM, 8.5-9 mM, 8.6-9.1 mM, 8.7-9.2 mM, 8.8-9.3 mM, 8.9-9.4 mM, 9-9.5 mM, 9.1-9.6 mM, 9.2-9.7 mM, 9.3-9.8 mM, 9.4-9.9 mM, 9.5-10 mM, 9.6-10.1 mM, 9.7-10.2 mM, 9.8-10.3 mM, 9.9-10.4 mM, 10-10.5 mM, 10.1-10.6 mM, 10.2-10.7 mM, 10.3-10.8 mM, 10.4-10.9 mM, 10.5-11 mM, 10.6-11.1 mM, 10.7-11.2 mM, 10.8-11.3 mM, 10.9-11.4 mM, 11-11.5 mM, 11.1-11.6 mM, 11.2-11.7 mM, 11.3-11.8 mM, 11.4-11.9 mM, 11.5-12 mM, 11.6-12.1 mM, 11.7-12.2 mM, 11.8-12.3 mM, 11.9-12.4 mM, 12-12.5 mM, 12.1-12,6 mM, 12.2-12.7 mM, 12.3-12.8 mM, 12.4-12.9 mM, 12.5-13 mM, 12.6-13.1 mM, 12.7-13.2 mM, 12.8-13.3 mM, 12.9-13.4 mM, 13-13.5 mM, 13.1-13.6 mM, 13.2-13.7 mM, 13.3-13.8 mM, 13.4-13.9 mM, 13.5-14 mM, 13.6-14.1 mM, 13.7-14.2 mM, 13.8-14.3 mM- 13.9-14.4 mM, 14-14.5 mM, 14.1-14.6 mM, 14.2-14.7 mM, 14.3-14.8 mM, 14.4-14.9 mM, 14.5-15 mM, 0-1 mM, 1-2 mM, 2-3 mM, 3-4 mM, 4-5 mM, 5-6 mM, 6-7 mM, 7-8 mM, 8-9 mM, 9-10 mM, 10-11 mM, 11-12 mM, 12-13 mM, 13-14 mM, 14-15 mM, 15-16 mM, 0-2 mM, 1-3 mM, 2-4 mM, 3-5 mM, 4-6 mM, 5-7 mM, 6-8 mM, 7-9 mM, 8-10 mM, 9-11 mM, 10-12 mM, 11-13 mM, 12-14 mM, 13-15 mM, 0-3 mM, 1-4 mM, 2-5 mM, 3-6 mM, 4-7 mM, 5-8 mM, 6-9 mM, 7-10 mM, 8-11 mM, 9-12 mM, 10-13 mM, 11-14 mM, 12-15 mM, 0-4 mM, 1-5 mM, 2-6 mM, 3-7 mM, 4-8 mM, 5-9 mM, 6-10 mM, 7-11 mM, 8-12 mM, 9-13 mM, 10-14 mM, 11-15 mM, 0-5 mM, 1-6 mM, 2-7 mM, 3-8 mM, 4-9 mM, 5-10 mM, 6-11 mM, 7-12 mM, 8-13 mM, 9-14 mM, 10-15 mM, 0-6 mM, 1-7 mM, 2-8 mM, 3-9 mM, 4-10 mM, 5-11 mM, 6-12 mM, 7-13 mM, 8-14 mM, 9-15 mM, 0-7 mM, 1-8 mM, 2-9 mM, 3-10 mM, 4-11 mM, 5-12 mM, 6-13 mM, 7-14 mM, 8-15 mM, 0-8 mM, 1-9mM, 2-10 mM, 3-11 mM, 4-12 mM, 5-13 mM, 6-14 mM, 7-15 mM, 0-9 mM, 1-10 mM, 2-11 mM, 3-12 mM, 4-13 mM, 5-14 mM, 6-15 mM, 0-10 mM, 1-11 mM, 2-12 mM, 3-13 mM, 4-14 mM, 5-15 mM, 0-11 mM, 1-12 mM, 2-13 mM, 3-14 mM, 4-15 mM, 0-12 mM, 1-13 mM, 2-14 mM, 3-15 mM, 0-13 mM, 1-14 mM, 2-15 mM, 0-14 mM, 1-15 mM, or 0-15 mM.

[0654] In certain embodiments, the formulation may comprise 0-10 mM of potassium phosphate.

[0655] In certain embodiments, the formulation may comprise 1-3 mM of potassium phosphate.

[0656] In certain embodiments, the formulation may comprise 1-2 mM of potassium phosphate.

[0657] In certain embodiments, the formulation may comprise 2-3 mM of potassium phosphate.

[0658] In certain embodiments, the formulation may comprise 2-12 mM of potassium phosphate.

[0659] In certain embodiments, the formulation may comprise 1.5 mM of potassium phosphate. As a non-limiting example, the formulation may comprise 1.54 mM of potassium phosphate.

[0660] In certain embodiments, the formulation may comprise 2 mM of potassium phosphate.

### Sodium Chloride

[0661] In certain embodiments, at least one of the components in the formulation is sodium chloride.

[0662] In certain embodiments, the concentration of sodium chloride in a formulation may be, but is not limited to, 75 mM, 76 mM, 77 mM, 78 mM, 79 mM, 80 mM, 81 mM, 82 mM, 83 mM, 84 mM, 85 mM, 86 mM, 87 mM, 88 mM, 89 mM, 90 mM, 91 mM, 92 mM, 93 mM, 94 mM, 95 mM, 96 mM, 97 mM, 98 mM, 99 mM, 100 mM, 101 mM, 102 mM, 103 mM, 104 mM, 105 mM, 106 mM, 107 mM, 108 mM, 109 mM, 110 mM, 111 mM, 112 mM, 113 mM, 114 mM, 115 mM, 116 mM, 117 mM, 118 mM, 119 mM, 120 mM, 121 mM, 122 mM, 123 mM, 124 mM, 125 mM, 126 mM, 127 mM, 128 mM, 129 mM, 130 mM, 131 mM, 132 mM, 133 mM, 134 mM, 135 mM, 136 mM, 137 mM, 138 mM, 139 mM, 140 mM, 141 mM, 142 mM, 143 mM, 144 mM, 145 mM, 146 mM, 147 mM, 148 mM, 149 mM, 150 mM, 151 mM, 152 mM, 153 mM, 154 mM, 155 mM, 156 mM, 157 mM, 158 mM, 159 mM, 160 mM, 161 mM, 162 mM, 163 mM, 164 mM, 165 mM, 166 mM, 167 mM, 168 mM, 169 mM, 170 mM, 171 mM, 172 mM, 173 mM, 174 mM, 175 mM, 176 mM, 177 mM, 178 mM, 179 mM, 180 mM, 181 mM, 182 mM, 183 mM, 184 mM, 185 mM, 186 mM, 187 mM, 188 mM, 189 mM, 190 mM, 191 mM, 192 mM, 193 mM, 194 mM, 195 mM, 196 mM, 197 mM, 198 mM, 199 mM, 200 mM, 201 mM, 202 mM, 203 mM, 204 mM, 205 mM, 206 mM, 207 mM, 208 mM, 209 mM, 210 mM, 211 mM, 212 mM, 213 mM, 214 mM, 215 mM, 216 mM, 217 mM, 218 mM, 219 mM, or 220 mM.

[0663] The formulation may comprise sodium chloride in a range of 7 -85 mM, 80-90 mM, 85-95 mM, 90-100 mM, 95-105 mM, 100-110 mM, 105-115 m 110-120 mM, 115-125 mM, 120-130 mM, 125-135 mM, 130-140 mM, 135-145 mM, 140-150 mM, 145-155 mM, 150-160 mM, 155-165 mM, 160-170 mM, 165-175 mM, 170-180 mM, 175-185 mM, 180-190 mM, 185-195 mM, 190-200 mM, 75-95 mM, 80-100 mM, 85-105 mM, 90-110 mM, 95-115 mM, 100-120 mM, 105-125 mM, 110-130 mM, 115-135 mM, 120-140 mM, 125-145 mM, 130-150 mM, 135-155 mM, 140-160 mM, 145-165 mM, 150-170 mM, 155-175 mM, 160-180 mM, 165-185 mM, 170-190 mM, 175-195 mM, 180-200 mM, 75-100 mM, 80-105 mM, 85-110 mM, 90-115 mM, 95-120 mM, 100-125 mM, 105-130 mM, 110-135 mM, 115-140 mM, 120-145 mM, 125-150 mM, 130-155 mM, 135-160 mM, 140-165 mM, 145-170 mM, 150-175 mM, 155-180 mM, 160-185 mM, 165-190 mM, 170-195 mM, 175-200 mM, 75-105 mM, 80-110 mM, 85-115 mM, 90-120 mM, 95-125 mM, 100-130 mM, 105-135 mM, 110-140 mM, 115-145 mM, 120-150 mM, 125-155 mM, 130-160 mM, 135-165 mM, 140-170 mM, 145-175 mM, 150-180 mM, 155-185 mM, 160-190 mM, 165-195 mM, 170-200 mM, 75-115 mM, 80-120 mM, 85-125 mM, 90-130 mM, 95-135 mM, 100-140 mM, 105-145 mM, 110-150 mM, 115-155 mM, 120-160 mM, 125-165 mM, 130-170 mM, 135-175 mM, 140-180 mM, 145-185 mM, 150-190 mM, 155-195 mM, 160-200 mM, 75-120 mM, 80-125 mM, 85-130 mM, 90-135 mM, 95-140 mM, 100-145 mM, 105-150 mM, 110-155 mM, 115-160 mM, 120-165 mM, 125-170 mM, 130-175 mM, 135-180 mM, 140-185 mM, 145-190 mM, 150-195 mM, 155-200 mM, 75-125 mM, 80-130 mM, 85-135 mM, 90-140 mM, 95-145 mM, 100-150 mM, 105-155 mM, 110-160 mM, 115-165 mM, 120-170 mM, 125-175 mM, 130-180 mM, 135-185 mM, 140-190 mM, 145-195 mM, 150-200 mM, 75-125 mM, 80-130 mM, 85-135 mM, 90-140 mM, 95-145 mM, 100-150 mM, 105-155 mM, 110-160 mM, 115-165 mM, 120-170 mM, 125-175 mM, 130-180 mM, 135-185 mM, 140-190 mM, 145-195 mM, 150-200 mM, 75-135 mM, 80-140 mM, 85-145 mM, 90-150 mM, 95-155 mM, 100-160 mM, 105-165 mM, 110-170 mM, 115-175 mM, 120-180 mM, 125-185 mM, 130-190 mM, 135-195 mM, 140-200 mM, 75-145 mM, 80-150 mM, 85-155 mM, 90-160 mM, 95-165 mM, 100-170 mM, 105-175 mM, 110-180 mM, 115-185 mM, 120-190 mM, 125-195 mM, 130-200 mM, 75-155 mM, 80-160 mM, 85-165 mM, 90-170 mM, 95-175 mM, 100-180 mM, 105-185 mM, 110-190 mM, 115-195 mM, 120-200 mM, 75-165 mM, 80-170 mM, 85-175 mM, 90-180 mM, 95-185 mM, 100-190 mM, 105-195 mM, 110-200 mM, 75-175 mM, 80-180 mM, 85-185 mM, 90-190 mM, 95-195 mM, 100-200 mM, 80-220 mM, 90-220 mM, 100-220 mM, 110-220 mM, 120-220 mM, 130-220 mM, 140-220 mM, 150-220 mM, 160-220 mM, 170-220 mM, 180-220 mM, 190-220 mM, 200-220 mM, or 210-220 mM.

[0664] In certain embodiments, the formulation may comprise 80-220 mM of sodium chloride.

[0665] In certain embodiments, the formulation may comprise 80-150 mM of sodium chloride.

[0666] In certain embodiments, the formulation may comprise 75 mM of sodium chloride.

[0667] In certain embodiments, the formulation may comprise 83 mM of sodium chloride.

[0668] In certain embodiments, the formulation may comprise 92 mM of sodium chloride.

[0669] In certain embodiments, the formulation may comprise 95 mM of sodium chloride.

[0670] In certain embodiments, the formulation may comprise 98 mM of sodium chloride

[0671] In certain embodiments, the formulation may comprise 100 mM of sodium chloride.

[0672] In certain embodiments, the formulation may comprise 107 mM of sodium chloride.

[0673] In certain embodiments, the formulation may comprise 109 mM of sodium chloride.

[0674] In certain embodiments, the formulation may comprise 118 mM of sodium chloride.

[0675] In certain embodiments, the formulation may comprise 125 mM of sodium chloride.

[0676] In certain embodiments, the formulation may comprise 127 mM of sodium chloride.

[0677] In certain embodiments, the formulation may comprise 133 mM of sodium chloride.

[0678] In certain embodiments, the formulation may comprise 142 mM of sodium chloride.

[0679] In certain embodiments, the formulation may comprise 150 mM of sodium chloride

[0680] In certain embodiments, the formulation may comprise 155 mM of sodium chloride.

[0681] In certain embodiments, the formulation may comprise 180 mM of sodium chloride.

[0682] In certain embodiments, the formulation may comprise 192 mM of sodium chloride.

[0683] In certain embodiments, the formulation may comprise 210 mM of sodium chloride.

### Potassium Chloride

[0684] In certain embodiments, at least one of the components in the formulation is potassium chloride.

[0685] In certain embodiments, the concentration of potassium chloride in a formulation may be, but is not limited to, 0.1 mM, 0.2 mM, 0.3 mM, 0.4 mM, 0.5 mM, 0.6 mM, 0.7 mM, 0.8 mM, 0.9 mM, 1 mM, 1.1 mM, 1.2 mM, 1.3 mM, 1.4 mM, 1.5 mM, 1.6 mM, 1.7 mM, 1.8 mM, 1.9 mM, 2 mM, 2.1 mM, 2.2 mM, 2.3 mM, 2.4 mM, 2.5 mM, 2.6 mM, 2.7 mM, 2.8 mM, 2.9 mM, 3 mM, 3.1 mM, 3.2 mM, 3.3 mM, 3.4 mM, 3.5 mM, 3.6 mM, 3.7 mM, 3.8 mM, 3.9 mM, 4 mM, 4.1 mM, 4.2 mM, 4.3 mM, 4.4 mM, 4.5 mM, 4.6 mM, 4.7 mM, 4.8 mM, 4.9 mM, 5 mM, 5.1 mM, 5.2 mM, 5.3 mM, 5.4 mM, 5.5 mM, 5.6 mM, 5.7 mM, 5.8 mM, 5.9 mM, 6 mM, 6.1 mM, 6.2 mM, 6.3 mM, 6.4 mM, 6.5 mM, 6.6 mM, 6.7 mM, 6.8 mM, 6.9 mM, 7 mM, 7.1 mM, 7.2 mM, 7.3 mM, 7.4 mM, 7,5 mM, 7.6 mM, 7.7 mM, 7.8 mM, 7.9 mM, 8 mM, 8.1 mM, 8.2 mM, 8.3 mM, 8.4 mM, 8.5 mM, 8.6 mM, 8.7 mM, 8.8 mM, 8.9 mM, 9 mM, 9.1 mM, 9.2 mM, 9.3 mM, 9.4 mM, 9.5 mM, 9.6 mM, 9.7 mM, 9.8 mM, 9.9 mM, 10 mM, 10.1 mM, 10.2 mM, 10.3 m.M, 10.4 mM, 10.5 mM, 10.6 mM, 10.7 mM, 10.8 mM, 10.9 mM, 11 mM, 11.1 mM, 11.2 mM, 11.3 mM, 11.4 mM, 11.5 mM, 11.6 mM, 11.7 mM, 11.8 mM, 11.9 mM, 12 mM, 12.1 mM, 12.2 mM, 12.3 mM, 12.4 mM, 12.5 mM, 12.6 mM, 12.7 mM, 12.8 mM, 12.9 mM, 13 mM, 13.1 mM, 13.2 mM, 13.3 mM, 13.4 mM, 13.5 mM, 13.6 mM, 13.7 mM, 13.8 mM, 13.9 mM, 1.4 mM, 14.1 mM, 14.2 mM, 14.3 mM, 14.4 mM, 14.5 mM, 14.6 mM, 14.7 mM, 14.8 mM, 14.9 mM or 15 mM.

[0686] The formulation may comprise potassium chloride in a range of 0-0.5 mM, 0.1-0.6 mM, 0.2-0.7 mM, 0.3-0.8 mM, 0.4-0.9 mM, 0.5-1 mM, 0.6-1.1 mM, 0.7-1.2 mM, 0.8-1.3 mM, 0.9-1.4 mM, 1-1.5 mM, 1.1-1.6 mM, 1.2-1.7 mM, 1.3-1.8 mM, 1.4-1.9 mM, 1.5-2 mM, 1.6-2.1 mM, 1.7-2.2 mM, 1.8-2.3 mM, 1.9-2.4 mM, 2-2.5 mM, 2.1-2.6 mM, 2.2-2.7 mM, 2.3-2.8 mM, 2.4-2.9 mM, 2.5-3 mM, 2.6-3.1 mM, 2.7-3.2 mM, 2.8-3.3 mM, 2.9-3.4 mM, 3-3.5 mM, 3.1-3.6 mM, 3.2-3.7 mM, 3.3-3.8 mM, 3.4-3.9 mM, 3.5-4 mM, 3.6-4.1 mM, 3.7-4.2 mM, 3.8-4.3 mM, 3.9-4.4 mM, 4-4.5 mM, 4.1-4.6 mM, 4.2-4.7 mM, 4.3-4.8 mM, 4.4-4.9 mM, 4.5-5 mM, 4.6-5.1 mM, 4.7-5.2 mM, 4.8-5.3 mM, 4.9-5.4 mM, 5-5.5 mM, 5.1-5.6 mM, 5.2-5.7 mM, 5.3-5.8 mM, 5.4-5.9 mM, 5.5-6 mM, 5.6-6.1 mM, 5.7-6.2 mM, 5.8-6.3 mM, 5.9-6.4 mM, 6-6.5 mM, 6.1-6.6 mM, 6.2-6.7 mM, 6.3-6.8 mM, 6.4-6.9 mM, 6.5-7 mM, 6.6-7.1 mM, 6.7-7.2 mM, 6.8-7.3 mM, 6.9-7.4 mM, 7-7.5 mM, 7.1-7.6 mM, 7.2-7.7 mM, 7.3-7.8 mM, 7.4-7.9 mM, 7.5-8 mM, 7.6-8.1 mM, 7.7-8.2 mM, 7.8-8.3 mM, 7.9-8.4 mM, 8-8.5 mM, 8.1-8.6 mM, 8.2-8.7 mM, 8.3-8.8 mM, 8.4-8.9 mM, 8.5-9 mM, 8.6-9.1 mM, 8.7-9.2 mM, 8.8-9.3 mM, 8.9-9.4 mM, 9-9.5 mM, 9.1-9.6 mM, 9.2-9.7 mM, 9.3-9.8 mM, 9.4-9.9 mM, 9.5-10 mM, 9.6-10.1 mM, 9.7-10.2 mM, 9.8-10.3 mM, 9.9-10.4 mM, 10-10.5 mM, 10.1-10.6 mM, 10.2-10.7 mM, 10.3-10.8 mM, 10.4-10.9 mM, 10.5-11 mM, 10.6-11.1 mM, 10.7-11.2 mM, 10.8-11.3 mM, 10.9-11.4 mM, 11-11.5 mM, 11.1-11.6 mM, 11.2-11.7 mM, 11.3-11.8 mM, 11.4-11.9 mM, 11.5-12 mM, 11.6-12.1 mM, 11.7-12.2 mM, 11.8-12.3 mM, 11.9-12.4 mM, 12-12.5 mM, 12.1-12.6 mM, 12.2-12.7 mM. 12.3-12.8 mM, 12.4-12.9 mM, 12.5-13 mM, 12.6-13.1 mM, 12.7-13.2 mM, 12.8-13.3 mM, 12.9-13.4 mM, 13-13.5 mM, 13.1-13.6 mM, 13.2-13.7 mM, 13.3-13.8 mM, 13.4-13.9 mM, 13.5-14 mM, 13.6-14.1 mM, 13.7-14.2 mM, 13.8-14.3 mM, 13.9-14.4 mM, 14-14.5 mM, 14.1-14.6 mM, 14.2-14,7 mM, 14.3-14.8 mM, 14.4-14.9 mM, 14.5-15 mM, 0-1 mM, 1-2 mM, 2-3 mM, 3-4 mM, 4-5 mM, 5-6 mM, 6-7 mM, 7-8 mM, 8-9 mM, 9-10 mM, 10-11 mM, 11-12 mM, 12-13 mM, 13-14 mM, 14-15 mM, 15-16 mM, 0-2 mM, 1-3 mM, 2-4 mM, 3-5 mM, 4-6 mM, 5-7 mM, 6-8 mM, 7-9 mM, 8-10 mM, 9-11 mM, 10-12 mM, 11-13 mM, 12-14 mM, 13-15 mM, 0-3 mM, 1-4 mM, 2-5 mM, 3-6 mM, 4-7 mM, 5-8 mM, 6-9 mM, 7-10 mM, 8-11 mM, 9-12 mM, 10-13 mM, 11-14 mM, 12-15 mM, 0-4 mM, 1-5 mM, 2-6 mM, 3-7 mM, 4-8 mM, 5-9 mM, 6-10 mM, 7-11 mM, 8-12 mM, 9-13 mM, 10-14 mM, 11-15 mM, 0-5 mM, 1-6 mM, 2-7 mM, 3-8 mM, 4-9 mM, 5-10 mM, 6-11 mM, 7-12 mM, 8-13 mM, 9-14 mM, 10-15 mM, 0-6 mM, 1-7 mM, 2-8 mM, 3-9 mM, 4-10 mM, 5-11 mM, 6-12 mM, 7-13 mM, 8-14 mM, 9-15 mM, 0-7 mM, 1-8 mM, 2-9 mM, 3-10 mM, 4-11 mM, 5-12 mM, 6-13 mM, 7-14 mM, 8-15 mM, 0-8 mM, 1-9 mM, 2-10 mM, 3-11 mM, 4-12 mM, 5-13 mM, 6-14 mM, 7-15 mM, 0-9 mM, 1-10 mM, 2-11 mM, 3-12 mM, 4-13 mM, 5-14 mM, 6-15 mM, 0-10 mM, 1-11 mM, 2-12 mM- 3-13 mM, 4-14 mM, 5-15 mM, 0-11 mM, 1-12 mM, 2-13 mM, 3-14 mM, 4-15 mM, 0-12 mM, 1-13 mM, 2-14 mM, 3-15 mM, 0-13 mM, 1-14 mM, 2-15 mM, 0-14 mM, 1-15 mM, or 0-15 mM.

[0687] In certain embodiments, the formulation may comprise 0-10 mM of potassium chloride.

[0688] In certain embodiments, the formulation may comprise 1-3 mM of potassium chloride.

[0689] In certain embodiments, the formulation may comprise 1-2 mM of potassium chloride.

[0690] In certain embodiments, the formulation may comprise 2-3 mM of potassium chloride.

[0691] In certain embodiments, the formulation may comprise 1.5 mM of potassium chloride.

[0692] In certain embodiments, the formulation may comprise 2.7 mM of potassium chloride.

### Magnesium Chloride

[0693] In certain embodiments, at least one of the components in the formulation is magnesium chloride.

[0694] In certain embodiments, the concentration of magnesium chloride may be, but is not limited to, 1 mM, 2 mM, 3 mM, 4 mM, 5 mM, 6 mM, 7 mM, 8 mM, 9 mM, 10 mM, 11 mM, 12 mM, 13 mM, 14 mM, 15 mM, 16 mM, 17 mM, 18 mM, 19 mM, 20 mM, 21 mM, 22 mM, 23 mM, 24 mM, 25 mM, 26 mM, 27 mM, 28 mM, 29 mM, 30 mM, 31 mM, 32 mM, 33 mM, 34 mM, 35 mM, 36 mM, 37 mM, 38 mM, 39 mM, 40 mM, 41 mM, 42 mM, 43 mM, 44 mM, 45 mM, 46 mM, 47 mM, 48 mM, 49 mM, 50 mM, 51 mM, 52 mM, 53 mM, 54 mM, 55 mM, 56 mM, 57 mM, 58 mM, 59 mM, 60 mM, 61 mM, 62 mM, 63 mM, 64 mM, 65 mM, 66 mM, 67 mM, 68 mM, 69 mM, 70 mM, 71 mM, 72 mM, 73 mM, 74 mM, 75 mM, 76 mM, 77 mM, 78 mM, 79 mM, 80 mM, 81 mM, 82 mM, 83 mM, 84 mM, 85 mM, 86 mM, 87 mM, 88 mM, 89 mM, 90 mM, 91 mM, 92 mM, 93 mM, 94 mM, 95 mM, 96 mM, 97 mM, 98 mM, 99 mM, or 100 mM.

[0695] The formulation may comprise magnesium chloride in a range of 0-5 mM, 1-5 mM, 2-5 mM, 3-5 mM, 4-5 mM, 0-10 mM, 1-10 mM, 2-10 mM, 3-10 mM, 4-10 mM, 5-10 mM, 6-10 mM, 7-10 mM, 8-10 mM, 9-10 mM, 0-25 mM, 1-25 mM, 2-25 mM, 3-25 mM, 4-25 mM, 5-25 mM, 6-25 mM, 7-25 mM, 8-25 mM, 9-25 mM, 10-25 mM, 11-25 mM, 12-25 mM, 13-25 mM, 14-25 mM, 15-25 mM, 16-25 mM, 17-25 mM, 18-25 mM, 19-25 mM, 20-25 mM, 21-25 mM, 22-25 mM, 23-25 mM, 24-25 mM, 0-50 mM, 1-50 mM, 2-50 mM, 3-50 mM, 4-50 mM, 5-50 mM, 6-50 mM, 7-50 mM, 8-50 mM, 9-50 mM, 10-50 mM, 11-50 mM, 12-50 mM, 13-50 mM, 14-50 mM, 15-50 mM, 16-50 mM, 17-50 mM, 18-50 mM, 19-50 mM, 20-50 mM, 21-50 mM, 22-50 mM, 23-50 mM, 24-50 mM, 25-50 mM, 26-50 mM, 27-28-50 mM, 29-50 mM, 30-50 mM, 31-50 mM, 32-50 mM, 33-50 mM, 34-50 mM, 35-50 mM, 36-50 mM, 37-50 mM, 38-50 mM, 39-50 mM, 40-50 mM, 41-50 mM, 42-50 mM, 43-50 mM, 44-50 mM, 45-50 mM, 46-50 mM, 47-50 mM, 48-50 mM, 49-50 mM, 0-75 mM, 1-75 mM, 2-75 mM, 3-75 mM, 4-75 mM, 5-75 mM, 6-75 mM, 7-75 mM, 8-75 mM, 9-75 mM, 10-75 mM, 11-75 mM, 12-75 mM, 13-75 mM, 14-75 mM, 15-75 mM, 16-75 mM, 17-75 mM, 18-75 mM, 19-75 mM, 20-75 mM, 21-75 mM, 22-75 mM, 23-75 mM, 24-75 mM, 25-75 mM, 26-75 mM, 27-75 mM, 28-75 mM, 29-75 ITEM, 30-75 mM, 31-75 mM, 32-75 mM, 33-75 mM, 34-75 mM, 35-75 mM, 36-75 mM, 37-75 mM, 38-75 mM, 39-75 mM, 40-75 mM, 41-75 mM, 42-75 mM, 43-75 mM, 44-75 mM, 45-75 mM, 46-75 mM, 47-75 mM, 48-75 mM, 49-75 mM, 50-75 mM, 51-75 mM, 52-75 mM, 53-75 mM, 54-75 mM, 55-75 mM, 56-75 mM, 57-75 mM, 58-75 mM, 59-75 mM, 60-75 mM, 61-75 mM, 62-75 mM, 63-75 mM, 64-75 mM, 65-75 mM, 66-75 mM, 67-75 mM, 68-75 mM, 69-75 mM, 70-75 mM, 71-75 mM, 72-75 mM, 73-75 mM, 74-75 mM, 50-100 mM, 60-100 mM, 75-100 mM, 80-100 mM, or 90-100 mM.

[0696] In certain embodiments, the formulation may comprise 0-75 mM of magnesium chloride.

[0697] In certain embodiments, the formulation may comprise 0-5 mM of magnesium chloride.

[0698] In certain embodiments, the formulation may comprise 50-100 mM of magnesium chloride.

[0699] In certain embodiments, the formulation may comprise 2 mM of magnesium chloride.

[0700] In certain embodiments, the formulation may comprise 75 mM of magnesium chloride.

### Tris

[0701] In certain embodiments, at least one of the components in the formulation is Tris (also called tris(hydroxymethyl)aminomethane, tromethamine or THAM).

[0702] In certain embodiments, the concentration of Tris in a formulation may be, but is not limited to, 0.1 mM, 0.2 mM, 0.3 mM, 0.4 mM, 0.5 mM, 0.6 mM, 0.7 mM, 0.8 mM, 0.9 mM, 1 mM, 1.1 mM, 1.2 mM, 1.3 mM, 1.4 mM, 1.5 mM, 1.6 mM, 1.7 mM, 1.8 mM, 1.9 mM, 2 mM, 2.1 mM, 2.2 mM, 2.3 mM, 2.4 mM, 2.5 mM, 2.6 mM, 2.7 mM, 2.8 mM, 2.9 mM, 3 mM, 3.1 mM, 3.2 mM, 3.3 mM, 3.4 mM, 3.5 mM, 3.6 mM, 3.7 mM, 3.8 mM, 3.9 mM, 4 mM, 4.1 mM, 4.2 mM, 4.3 mM, 4.4 mM, 4.5 mM, 4.6 mM, 4.7 mM, 4.8 mM, 4.9 mM, 5 mM, 5.1 mM, 5.2 mM, 5.3 mM, 5.4 mM, 5.5 mM, 5.6 mM, 5.7 mM, 5.8 mM, 5.9 mM, 6 mM, 6.1 mM, 6.2 mM, 6.3 mM, 6.4 mM, 6.5 mM, 6.6 mM, 6.7 mM, 6.8 mM, 6.9 mM, 7 mM, 7.1 mM, 7.2 mM, 7.3 mM, 7.4 mM, 7.5 mM, 7.6 mM, 7.7 mM, 7.8 mM, 7.9 mM, 8 mM, 8.1 mM, 8.2 mM, 8.3 mM, 8.4 mM, 8.5 mM, 8.6 mM, 8.7 mM, 8.8 mM, 8.9 mM, 9 mM, 9.1 mM, 9.2 mM, 9.3 mM, 9.4 mM, 9.5 mM, 9.6 mM, 9.7 mM, 9.8 mM, 9.9 mM, 10 mM, 10.1 mM, 10.2 mM, 10.3 mM, 0.4 mM, 10.5 mM, 10.6 mM, 10.7 mM, 10.8 mM, 10.9 mM, 11 mM, 11.1 mM, 11.2mM, 1.3 mM, 11.4 mM, 11.5 mM, 11.6 mM, 11.7 mM, 11.8 mM, 11.9 mM, 12 mM, 12.1 mM, 12.2 mM, 12.3 mM, 12.4 mM, 12.5 mM, 12.6 mM, 12.7 mM, 12.8 mM, 12.9 mM, 13 mM, 13.1 mM, 13.2 mM, 13.3 mM, 13.4 mM, 13.5 mM, 13.6 mM, 13.7 mM, 13.8 mM, 13.9 mM, 14 mM, 14.1 mM, 14.2 mM, 14.3 mM, 14.4 mM, 14.5 mM, 14.6 mM, 14.7 mM, 14.8 mM, 14.9 mM, or 15 mM.

[0703] The formulation may comprise Tris in a range of 0-0.5 mM, 0.1-0.6 mM, 0.2-0.7 mM, 0.3-0.8 mM, 0.4-0.9 mM, 0.5-1 mM, 0.6-1.1 mM, 0.7-1.2 mM, 0.8-1.3 mM, 0.9-1.4 mM, 1-1.5 mM, 1.1-1.6 mM, 1.2-1.7 mM, 1.3-1.8 mM, 1.4-1.9 mM, 1.5-2 mM, 1.6-2.1 mM, 1.7-2.2 mM, 1.8-2.3 mM, 1.9-2.4 mM, 2-2.5 mM, 2.1-2.6 mM, 2.2-2.7 mM, 2.3-2.8 mM, 2.4-2.9 mM, 2.5-3 mM, 2.6-3.1 mM, 2.7-3.2 mM, 2.8-3.3 mM, 2.9-3.4 mM, 3-3.5 mM, 3.1-3.6 mM, 3.2-3.7 mM, 3.3-3.8 mM, 3.4-3.9 mM, 3.5-4 mM, 3.6-4.1 mM, 3.7-4.2 mM, 3.8-4.3 mM, 3.9-4.4 mM, 4-4.5 mM, 4.1-4.6 mM, 4.2-4.7 mM, 4.3-4.8 mM, 4.4-4.9 mM, 4.5-5 mM, 4.6-5.1 mM, 4.7-5.2 mM, 4.8-5.3 mM, 4.9-5.4 mM, 5-5.5 mM, 5.1-5.6 mM, 5.2-5.7 mM, 5.3-5.8 mM, 5.4-5.9 mM, 5.5-6 mM, 5.6-6.1 mM, 5.7-6.2 mM, 5.8-6.3 mM, 5.9-6.4 mM, 6-6.5 mM, 6.1-6.6 mM, 6.2-6.7 mM, 6.3-6.8 mM, 6.4-6.9 mM, 6.5-7 mM, 6.6-7.1 mM, 6.7-7.2 mM, 6.8-7.3 mM, 6.9-7.4 mM, 7-7.5 mM, 7.1-7.6 mM, 7.2-7.7 mM, 7.3-7.8 mM, 7.4-7.9 mM, 7.5-8 mM, 7.6-8.1 mM, 7.7-8.2 mM, 7.8-8.3 mM, 7.9-8.4 mM, 8-8.5 mM, 8.1-8.6 mM, 8.2-8.7 mM, 8.3-8.8 mM, 8.4-8.9 mM, 8.5-9 mM, 8.6-9.1 mM, 8.7-9.2 mM, 8.8-9.3 mM, 8.9-9.4 mM, 9-9.5 mM, 9.1-9.6 mM, 9.2-9.7 mM, 9.3-9.8 mM, 9.4-9.9 mM, 9.5-10 mM, 9.6-10.1 mM 9.7-10.2 mM, 9.8-10.3 mM, 9.9-10.4 mM, 10-10.5 mM, 10.1-10.6 mM, 10.2-10.7 mM, 10.3-10.8 mM, 10.4-10.9 mM, 10.5-11 mM, 10.6-11.1 mM, 10.7-11.2 mM, 10.8-11.3 mM, 10.9-11.4 mM, 11-11.5 mM, 11.1-11.6 mM, 11.2-11.7 mM, 11.3-11.8 mM, 11.4-11.9 mM, 11.5-12 mM, 11.6-12.1 mM, 11.7-12.2 mM, 11.8-12.3 mM, 11.9-12.4 mM, 12-12.5 mM, 12.1-12.6 mM, 12.2-12.7 mM, 12.3-12.8 mM, 12.4-12.9 mM, 12.5-13 mM, 12.6-13.1 mM, 12.7-13.2 mM, 12.8-13.3 mM, 12.9-13.4 mM, 13-13.5 mM, 13.1-13.6 mM, 13.2-13.7 mM, 13.3-13.8 mM, 13.4-13.9 mM, 13.5-14 mM, 13.6-14.1 mM, 13.7-14.2 mM, 13.8-14.3 mM, 13.9-14.4 mM, 14-14.5 mM, 14.1-14.6 mM, 14.2-14.7 mM, 14.3-14.8 mM, 14.4-14.9 mM, 14.5-15 mM, 0-1 mM, 1-2 mM, 2-3 mM, 3-4 mM, 4-5 mM, 5-6 mM, 6-7 mM, 7-8 mM, 8-9 mM, 9-10 mM, 10-11 mM, 11-12 mM, 12-13 mM, 13-14 mM, 14-15 mM, 15-16 mM, 0-2 mM, 1-3 mM, 2-4 mM, 3-5 mM, 4-6 mM, 5-7 mM, 6-8 mM, 7-9 mM, 8-10 mM, 9-11 mM, 10-12 mM, 11-13 mM, 12-14 mM, 13-15 mM, 0-3 mM, 1-4 mM, 2-5 mM, 3-6 mM, 4-7 mM, 5-8 mM, 6-9 mM, 7-10 mM, 8-11 mM, 9-12 mM, 10-13 mM, 11-14 mM, 12-15 mM, 0-4 mM, 1-5 mM, 2-6 mM, 3-7 mM, 4-8 mM, 5-9 mM, 6-10 mM, 7-11 mM, 8-12 mM, 9-13 mM, 10-14 mM, 11-15 mM, 0-5 mM, 1-6 mM, 2-7 mM, 3-8 mM, 4-9 mM, 5-10 mM, 6-11 mM, 7-12 mM, 8-13 mM, 9-14 mM, 10-15 mM, 0-6 mM, 1-7 mM, 2-8 mM, 3-9 mM, 4-10 mM, 5-11 mM, 6-12 mM, 7-13 mM, 8-14 mM, 9-15 mM, 0-7 mM, 1-8 mM, 2-9 mM, 3-10 mM, 4-11 mM, 5-12 mM, 6-13 mM, 7-14 mM, 8-15 mM, 0-8 mM, 1-9 mM, 2-10 mM, 3-11 mM, 4-12 mM, 5-13 mM, 6-14 mM, 7-15 mM, 0-9 mM, 1-10 mM, 2-11 mM, 3-12 mM, 4-13 mM, 5-14 mM, 6-15 mM, 0-10 mM, 1-11 mM, 2-12 mM, 3-13 mM, 4-14 mM, 5-15 mM, 0-11 mM, 1-12 mM, 2-13 mM, 3-14 mM, 4-15 mM, 0-12 mM, 1-13 mM, 2-14 mM, 3-15 mM, 0-13 mM, 1-14 mM, 2-15 mM, 0-14 mM, 1-15 mM, or 0-15 mM.

[0704] In certain embodiments, the formulation may comprise 0-10 mM of Iris.

[0705] In certain embodiments, the formulation may comprise 2-12 mM of Tris.

[0706] In certain embodiments, the formulation may comprise 10 mM of Tris.

### Histidine

[0707] In certain embodiments, at least one of the components in the formulation is Histidine.

[0708] In certain embodiments, the concentration of Histidine in a formulation may be, but is not limited to, 0.1 mM, 0.2 mM, 0.3 mM, 0.4 mM, 0.5 mM, 0.6 mM, 0.7 mM, 0.8 mM, 0.9 mM, 1 mM, 1.1 mM, 1.2 mM, 1.3 mM, 1.4 mM, 1.5 mM, 1.6 mM, 1,7 mM, 1.8 mM, 1.9 mM, 2 mM, 2.1 mM, 2.2 mM, 2.3 mM, 2.4 mM, 2.5 mM, 2.6 mM, 2.7 mM, 2.8 mM, 2.9 mM, 3 mM, 3.1 mM, 3.2 mM, 3.3 mM, 3.4 mM, 3.5 mM, 3.6 mM, 3.7 mM, 3.8 mM, 3.9 mM, 4 mM, 4.1 mM, 4.2 mM, 4.3 mM, 4.4 mM, 4.5 mM, 4.6 mM, 4.7 mM, 4.8 mM, 4.9 mM, 5 mM, 5.1 mM, 5.2 mM, 5.3 mM, 5.4 mM, 5.5 mM, 5,6 mM, 5,7 mM, 5.8 mM, 5.9 mM, 6 mM, 6.1 mM, 6.2 mM, 6.3 mM, 6.4 mM, 6.5 mM, 6.6 mM, 6.7 mM, 6.8 mM, 6.9 mM, 7 mM, 7.1 mM, 7.2 mM, 7.3 mM, 7.4 mM, 7.5 mM, 7.6 mM, 7.7 mM, 7.8 mM, 7.9 mM, 8 mM, 8.1mM, 8.2 mM, 8.3 mM, 8.4 mM, 8.5 mM, 8.6 mM, 8.7 mM, 8.8 mM, 8.9 mM, 9 mM, 9.1 mM, 9.2 mM, 9.3 mM, 9.4 mM, 9.5 mM, 9.6 mM, 9.7 mM, 9.8 mM, 9.9 mM, 10 mM, 10.1 mM, 10.2 mM, 10.3 mM, 10.4 mM, 10.5 mM, 10.6 mM, 10.7 mM, 10.8 mM, 10.9 mM, 11 mM, 11.1 mM, 11.2 mM, 11.3 mM, 11.4 mM, 11.5 mM, 11.6 mM, 11.7 mM, 11.8 mM, 11.9 mM, 12 mM, 12.1 mM, 12.2 mM, 12.3 mM, 12.4 mM, 12.5 mM, 12.6 mM, 12.7 mM, 12.8 mM, 12.9 mM, 13 mM, 13.1 mM, 13.2 mM, 13.3 mM, 13.4 mM, 13.5 mM, 13.6 mM, 13.7 mM, 13.8 mM, 13.9 mM, 14 mM, 14.1 mM, 14.2 mM, 14.3 mM, 14.4 mM, 14.5 mM, 14.6 mM, 14.7 mM, 14.8 mM, 14.9 mM or 15 mM.

[0709] The formulation may comprise Histidine in a range of 0-0.5 mM, 0.1-0.6 mM, 0.2-0.7 mM, 0.3-0.8 mM, 0.4-0.9 mM, 0.5-1 mM, 0.6-1.1 mM, 0.7-1.2 mM, 0.8-1.3 mM, 0.9-1.4 mM, 1-1.5 mM, 1.1-1.6 mM, 1.2-1.7 mM, 1.3-1.8 mM, 1.4-1.9 mM, 1.5-2 mM, 1.6-2.1 mM, 1.7-2.2 mM, 1.8-2.3 mM, 1.9-2.4 mM, 2-2.5 mM, 2.1-2.6 mM, 2.2-2.7 mM, 2.3-2.8 mM, 2.4-2.9 mM, 2.5-3 mM, 2.6-3.1 mM, 2.7-3.2 mM, 2.8-3.3 mM, 2.9-3.4 mM, 3-3.5 mM, 3.1-3.6 mM, 3.2-3.7 mM, 3.3-3.8 mM, 3.4-3.9 mM, 3,5-4 mM, 3.6-4.1 mM, 3.7-4.2 mM, 3.8-4.3 mM, 3.9-4.4 mM, 4-4.5 mM, 4.1-4.6 mM, 4.2-4.7 mM, 4.3-4.8 mM, 4.4-4.9 mM, 4.5-5 mM, 4.6-5.1 mM, 4.7-5.2 mM, 4.8-5.3 mM, 4.9-5.4 mM, 5-5.5 mM, 5.1-5.6 mM, 5.2-5.7 mM, 5.3-5.8 mM, 5.4-5.9 mM, 5.5-6 mM, 5.6-6.1 mM, 5.7-6.2 mM, 5.8-6.3 mM, 5.9-6.4 mM, 6-6.5 mM, 6.1-6.6 mM, 6.2-6.7 mM, 6.3-6.8 mM, 6.4-6.9 mM, 6.5-7 mM, 6.6-7.1 mM, 6.7-7.2 mM, 6.8-7.3 mM, 6.9-7.4 mM, 7-7.5 mM, 7.1-7.6 mM, 7.2-7.7 mM, 7.3-7.8 mM, 7.4-7.9 mM, 7.5-8 mM, 7.6-8.1 mM, 7.7-8.2 mM, 7.8-8.3 mM, 7.9-8.4 mM, 8-8.5 mM, 8.1-8.6 mM, 8.2-8.7 mM, 8.3-8.8 mM, 8.4-8.9 mM, 8.5-9 mM, 8.6-9.1 mM, 8.7-9.2 mM, 8.8-9.3 mM, 8.9-9.4 mM, 9-9.5 mM, 9.1-9.6 mM, 9.2-9.7 mM, 9.3-9.8 mM, 9.4-9.9 mM, 9.5-10 mM- 9.6-10.1 mM, 9.7-10.2 mM, 9.8-10.3 mM, 9.9-10.4 mM, 10-10.5 mM, 10.1-10.6 mM, 10.2-10.7 mM, 10.3-10.8 mM, 10.4-10.9 mM, 10.5-11 mM, 10.6-11.1 mM, 10.7-11.2 mM, 10.8-11.3 mM, 10.9-11.4 mM, 11-11.5 mM, 11.1-11.6 mM, 11.2-11.7 mM, 11.3-11.8 mM, 11.4-11.9 mM, 11.5-12 mM, 11.6-12.1 mM, 11.7-12.2 mM, 11.8-12.3 mM, 11.9-12.4 mM, 12-12.5 mM, 12.1-12.6 mM, 12.2-12.7 mM, 12.3-12.8 mM, 12.4-12.9 mM, 12.5-13 mM, 12.6-13.1 mM, 12.7-13.2 mM, 12.8-13.3 mM, 12.9-13.4 mM, 13-13.5 mM, 13.1-13.6 mM, 13.2-13.7 mM, 13.3-13.8 mM, 13.4-13.9 mM, 13.5-14 mM, 13.6-14.1 mM, 13.7-14.2 mM, 13.8-14.3 mM, 13.9-14.4 mM, 14-14.5 mM, 14.1-14.6 mM, 14.2-14.7 mM, 14.3-14.8 mM, 14.4-14.9 mM, 14.5-15 mM, 0-1 mM, 1-2 mM, 2-3 mM, 3-4 mM, 4-5 mM, 5-6 mM, 6-7 mM, 7-8 mM, 8-9 mM, 9-10 mM, 10-11 mM, 11-12 mM, 12-13 mM, 13-14 mM, 14-15 mM, 15-16 mM, 0-2 mM, 1-3 mM, 2-4 mM, 3-5 mM, 4-6 mM, 5-7 mM, 6-8 mM, 7-9 mM, 8-10 mM, 9-11 mM, 10-12 mM, 11-13 mM, 12-14 mM, 13-15 mM, 0-3 mM, 1-4 mM, 2-5 mM, 3-6 mM, 4-7 mM, 5-8 mM, 6-9 mM, 7-10 mM, 8-11 mM, 9-12 mM, 10-13 mM, 11-14 mM, 12-15 mM, 0-4 mM, 1-5 mM, 2-6 mM, 3-7 mM, 4-8 mM, 5-9 mM, 6-10 mM, 7-11 mM, 8-12 mM, 9-13 mM, 10-14 mM, 11-15 mM, 0-5 mM, 1-6 mM, 2-7 mM, 3-8 mM, 4-9 mM, 5-10 mM, 6-11 mM, 7-12 mM, 8-13 mM, 9-14 mM, 10-15 mM, 0-6 mM, 1-7 mM, 2-8 mM, 3-9 mM, 4-10 mM, 5-11 mM, 6-12 mM, 7-13 mM, 8-14 mM, 9-15 mM, 0-7 mM, 1-8 mM, 2-9 mM, 3-10 mM, 4-11 mM, 5-12 mM, 6-13 mM, 7-14 mM, 8-15 mM, 0-8 mM, 1-9 mM, 2-10 mM, 3-11 mM, 4-12 mM, 5-13 mM, 6-14 mM, 7-15 mM, 0-9 mM, 1-10 mM, 2-11 mM, 3-12 mM, 4-13 mM, 5-14 mM, 6-15 mM, 0-10 mM, 1-11 mM, 2-12 mM, 3-13 mM, 4-14 mM, 5-15 mM, 0-11 mM, 1-12 mM, 2-13 mM, 3-14 mM, 4-15 mM, 0-12 mM, 1-13 mM, 2-14 mM, 3-15 mM, 0-13 mM, 1-14 mM, 2-15 mM, 0-14 mM, 1-15 mM, or 0-15 mM.

[0710] In certain embodiments, the formulation may comprise 0-10 mM of Histidine.

[0711] In certain embodiments, the formulation may comprise 2-12 mM of Histidine.

[0712] In certain embodiments, the formulation may comprise 10 mM of Histidine.

### Arginine

[0713] In certain embodiments, at least one of the components in the formulation is arginine.

[0714] In certain embodiments, the concentration of arginine may be, but is not limited to, 1 mM, 2 mM, 3 mM, 4 mM, 5 mM, 6 mM, 7 mM, 8 mM, 9 mM, 10 mM, 11 mM, 12 mM, 13 mM, 14 mM, 15 mM, 16 mM, 17 mM, 18 mM, 19 mM, 20 mM, 21 mM, 22 mM, 23 mM, 24 mM, 25 mM, 26 mM, 27 mM, 28 mM, 29 mM, 30 mM, 31 mM, 32 mM, 33 mM, 34 mM, 35 mM, 36 mM, 37 mM, 38 mM, 39 mM, 40 mM, 41 mM, 42 mM, 43 mM, 44 mM, 45 mM, 46 mM, 47 mM, 48 mM, 49 mM, 50 mM, 51 mM, 52 mM, 53 mM, 54 mM, 55 mM, 56 mM, 57 mM, 58 mM, 59 mM, 60 mM, 61 mM, 62 mM, 63 mM, 64 mM, 65 mM, 66 mM, 67 mM, 68 mM, 69 mM, 70 mM, 71 mM, 72 mM, 73 mM, 74 mM, 75 mM, 76 mM, 77 mM, 78 mM, 79 mM, 80 mM, 81 mM, 82 mM, 83 mM, 84 mM, 85 mM, 86 mM, 87 mM, 88 mM, 89 mM, 90 mM, 91 mM, 92 mM, 93 mM, 94 mM, 95 mM, 96 mM, 97 mM, 98 mM, 99 mM, or 100 mM.

[0715] The formulation may comprise arginine in a range of 0-5 mM, 1-5 mM, 2-5 mM, 3-5 mM, 4-5 mM, 0-10 mM, 1-10 mM, 2-10 mM, 3-10 mM, 4-10 mM, 5-10 mM, 6-10 mM, 7-10 mM, 8-10 mM, 9-10 mM, 0-25 mM, 1-25 mM, 2-25 mM, 3-25 mM, 4-25 mM, 5-25 mM, 6-25 mM, 7-25 mM, 8-25 mM, 9-25 mM, 10-25 mM, 11-25 mM, 12-25 mM, 13-25 mM, 14-25 mM, 15-25 mM, 16-25 mM, 17-25 mM, 18-25 mM, 19-25 mM, 20-25 mM, 21-25 mM, 22-25 mM, 23-25 mM, 24-25 mM, 0-50 mM, 1-50 mM, 2-50 mM, 3-50 mM, 4-50 mM, 5-50 mM, 6-50 mM, 7-50 mM, 8-50 mM, 9-50 mM, 10-50 mM, 11-50 mM, 12-50 mM, 13-50 mM, 14-50 mM, 15-50 mM, 16-50 mM, 17-50 mM, 18-50 mM, 19-50 mM, 20-50 mM, 21-50 mM, 22-50 mM, 23-50 mM, 24-50 mM, 25-50 mM, 26-50 mM, 27-50 mM, 28-29-50 mM, 30-50 mM, 31-50 mM, 32-50 mM, 33-50 mM, 34-50 mM, 35-50 mM, 36-50 mM, 37-50 mM, 38-50 mM, 39-50 mM, 40-50 mM, 41-50 mM, 42-50 mM, 43-50 mM, 44-50 mM, 45-50 mM, 46-50 mM, 47-50 mM, 48-50 mM, 49-50 mM, 0-75 mM, 1-75 mM, 2-75 mM, 3-75 mM, 4-75 mM, 5-75 mM, 6-75 mM, 7-75 mM, 8-75 mM, 9-75 mM, 10-11-75 mM, 12-75 mM, 13-75 mM, 14-75 mM, 15-75 mM, 16-75 mM, 17-75 mM, 18-75 mM, 19-75 mM, 20-75 mM, 21-75 mM, 22-75 mM, 23-75 mM, 24-75 mM, 25-75 mM, 26-75 mM, 27-75 mM, 28-75 mM, 29-75 mM, 30-75 ITEM, 31-75 mM, 32-75 mM, 33-75 mM, 34-75 mM, 35-75 mM, 36-75 mM, 37-75 mM, 38-75 mM, 39-75 mM, 40-75 mM, 41-75 mM, 42-75 mM, 43-75 mM, 44-75 mM, 45-75 mM, 46-75 mM, 47-75 mM, 48-75 mM, 49-75 mM, 50-75 mM, 51-75 mM, 52-75 mM, 53-75 mM, 54-75 mM, 55-75 mM, 56-75 mM, 57-75 mM, 58-75 mM, 59-75 mM, 60-75 mM, 61-75 mM, 62-75 mM, 63-75 mM, 64-75 mM, 65-75 mM, 66-75 mM, 67-75 mM, 68-75 mM, 69-75 mM, 70-75 mM, 71-75 mM, 72-75 mM, 73-75 mM, 74-75 mM, 50-100 mM, 60-100 mM, 75-100 mM, 80-100 mM, or 90-100 mM.

[0716] In certain embodiments, the formulation may comprise 0-75 mM, of arginine.

[0717] In certain embodiments, the formulation may comprise 50-100 mM of arginine.

[0718] In certain embodiments, the formulation may comprise 75 mM of arginine.

### Hydrochloric Acid

[0719] In certain embodiments, at least one of the components in the formulation is hydrochloric acid.

[0720] In certain embodiments, the concentration of hydrochloric acid in a formulation may be, but is not limited to, 0.1 mM, 0.2 mM, 0.3 mM, 0.4 mM, 0.5 mM, 0.6 mM, 0.7 mM, 0.8 mM, 0.9 mM, 1 mM, 1.1 mM, 1.2 mM, 1.3 mM, 1.4 mM, 1.5 mM, 1.6 mM, 1.7 mM, 1.8 mM, 1.9 mM, 2 mM, 2.1 mM, 2.2 mM, 2.3 mM, 2.4 mM, 2.5 mM, 2.6 mM, 2.7 mM, 2.8 mM, 2.9 mM, 3 mM, 3.1 mM, 3.2 mM, 3.3 mM, 3.4 mM, 3.5 mM, 3.6 mM, 3.7 mM, 3.8 mM, 3.9 mM, 4 mM, 4.1 mM, 4.2 mM, 4.3 mM, 4.4 mM, 4.5 mM, 4.6 mM, 4.7 mM, 4.8 mM, 4.9 mM, 5 mM, 5.1 mM, 5.2 mM, 5.3 mM, 5.4 mM, 5.5 mM, 5.6 mM, 5.7 mM, 5.8 mM, 5.9 mM, 6 mM, 6.1 mM, 6.2 mM, 6.3 mM, 6.4 mM, 6.5 mM, 6.6 mM, 6.7 mM, 6.8 mM, 6.9 mM, 7 mM, 7.1 mM, 7.2 mM, 7.3 mM, 7.4 mM, 7.5 mM, 7.6 mM, 7.7 mM, 7.8 mM, 7.9 mM, 8 mM, 8.1 mM, 8.2 mM, 8.3 mM, 8.4 mM, 8.5 mM, 8.6 mM, 8.7 mM, 8.8 mM, 8.9 mM, 9 mM, 9.1 mM, 9.2 mM, 9.3 mM, 9.4 mM, 9.5 mM, 9.6 mM, 9.7 mM, 9.8 mM, 9.9 mM, 10 mM, 10.1 mM, 10.2 mM, 10.3 mM, 10.4 mM, 10.5 mM, 10.6 mM, 10.7 mM, 10.8 mM, 10.9 mM, 11 mM, 11.1 mM, 11.2 mM, 11.3 mM, 11.4 mM, 11.5 mM, 11.6 mM, 11.7 mM, 11.8 mM, 11.9 mM, 12 mM, 12.1 mM, 12.2 mM, 12,3 mM, 12.4 m12.4 mM, 12.5 mM, 12.6 mM, 12.7 mM, 12.8 mM, 12.9 mM, 13 mM, 13.1 mM, 13.2 mM, 13,3 mM, 13.4 mM, 13.5 mM, 13.6 mM, 13.7 mM, 13.8 mM, 13.9 mM, 14 mM, 14.1 mM, 14.2 mM, 14.3 mM, 14.4 mM, 14.5 mM, 14.6 mM, 14.7 mM, 14.8 mM, 14.9 mM or 15 mM.

[0721] The formulation may comprise hydrochloric acid in a range of 0-0.5 mM, 0.1-0.6 mM, 0.2-0.7 mM, 0.3-0.8 mM, 0.4-0.9 mM, 0.5-1 mM, 0.6-1.1 mM, 0.7-1.2 mM, 0.8-1.3 mM, 0.9-1.4 mM, 1-1.5 mM, 1.1-1.6 mM, 1.2-1.7 mM, 1.3-1.8 mM, 1.4-1.9 mM, 1.5-2 mM, 1.6-2.1 mM, 1.7-2.2 mM, 1.8-2.3 mM, 1.9-2.4 mM, 2-2.5 mM, 2.1-2.6 mM, 2.2-2.7 mM, 2.3-2.8 mM, 2.4-2.9 mM, 2.5-3 mM, 2.6-3.1 mM, 2.7-3.2 mM, 2.8-3.3 mM, 2.9-3.4 mM, 3-3.5 mM, 3.1-3.6 mM, 3.2-3.7 mM, 3.3-3.8 mM, 3.4-3.9 mM, 3.5-4 mM, 3.6-4.1 mM, 3.7-4.2 mM 3.8-4.3 mM, 3.9-4.4 mM, 4-4.5 mM, 4.1-4.6 mM, 4.2-4.7 mM, 4.3-4.8 mM, 4.4-4.9 mM, 4.5-5 mM, 4.6-5.1 mM, 4.7-5.2 mM, 4.8-5.3 mM, 4.9-5.4 mM, 5-5.5 mM, 5.1-5.6 mM, 5.2-5.7 mM, 5.3-5.8 mM, 5.4-5.9 mM, 5.5-6 mM, 5.6-6.1 mM, 5.7-6.2 mM, 5.8-6.3 mM, 5.9-6.4 mM, 6-6.5 mM, 6.1-6.6 mM, 6.2-6.7 mM, 6.3-6.8 mM, 6.4-6.9 mM, 6.5-7 mM, 6.6-7.1 mM, 6.7-7.2 mM, 6.8-7.3 mM, 6.9-7.4 mM, 7-7.5 mM, 7.1-7.6 mM, 7.2-7.7 mM, 7.3-7.8 mM, 7.4-7.9 mM, 7.5-8 mM, 7.6-8.1 mM, 7.7-8.2 mM, 7.8-8.3 mM, 7.9-8.4 mM, 8-8.5 mM, 8.1-8.6 mM, 8.2-8.7 mM, 8.3-8.8 mM, 8.4-8.9 mM, 8.5-9 mM, 8.6-9.1 mM, 8.7-9.2 mM, 8.8-9.3 mM, 8.9-9.4 mM, 9-9.5 mM, 9.1-9.6 mM, 9.2-9.7 mM, 9.3-9.8 mM, 9.4-9.9 mM, 9.5-10 mM 9.6-10.1 mM, 9.7-10.2 mM, 9.8-10.3 mM, 9.9-10.4 mM, 10-10.5 mM, 10.1-10.6 mM, 10.2-10.7 mM, 10.3-10.8 mM, 10.4-10.9 mM, 10.5-11 mM, 10.6-11.1 mM, 10.7-11.2 mM, 10.8-11.3 mM, 10.9-11.4 mM, 11-11.5 mM, 11.1-11.6 mM, 11.2-11.7 mM, 11.3-11.8 mM, 11.4-11.9 mM, 11.5-12 mM, 11.6-12.1 mM, 11.7-12.2 mM, 11.8-12.3 mM, 11.9-12.4 mM, 12-12.5 mM, 12,1-12.6 mM, 12.2-12.7 mM, 12.3-12.8 mM, 12.4-12.9 mM, 12.5-13 mM, 12.6-13.1 mM, 12.7-13.2 mM, 12.8-13.3 mM, 12.9-13.4 mM, 13-13.5 mM, 13.1-13.6 mM, 13.2-13.7 mM, 13.3-13.8 mM, 13.4-13.9 mM, 13.5-14 mM, 13.6-14.1 mM, 13.7-14.2 mM, 13.8-14.3 mM, 13.9-14.4 mM, 14-14.5 mM, 14.1-14.6 mM, 14.2-14.7 mM, 14.3-14.8 mM, 14.4-14.9 mM, 14.5-15 mM, 0-1 mM, 1-2 mM, 2-3 mM, 3-4 mM, 4-5 mM, 5-6 mM, 6-7 mM, 7-8 mM, 8-9 mM, 9-10 mM, 10-11 mM, 11-12 mM, 12-13 mM, 13-14 mM, 14-15 mM, 15-16 mM, 0-2 mM, 1-3 mM, 2-4 mM, 3-5 mM, 4-6 mM, 5-7 mM, 6-8 mM, 7-9 mM, 8-10 mM, 9-11 mM, 10-12 mM, 11-13 mM, 12-14 mM, 13-15 mM, 0-3 mM, 1-4 mM, 2-5 mM, 3-6 mM, 4-7 mM, 5-8 mM, 6-9 mM, 7-10 mM, 8-11 mM, 9-12 mM, 10-13 mM, 11-14 mM, 12-15 mM, 0-4 mM, 1-5 mM, 2-6 mM, 3-7 mM, 4-8 mM, 5-9 mM, 6-10 mM, 7-11 mM, 8-12 mM, 9-13 mM, 10-14 mM, 11-15 mM, 0-5 mM, 1-6 mM, 2-7 mM, 3-8 mM, 4-9 mM, 5-10 mM, 6-11 mM, 7-12 mM, 8-13 mM, 9-14 mM, 10-15 mM, 0-6 mM, 1-7 mM, 2-8 mM, 3-9 mM, 4-10 mM, 5-11 mM, 6-12 mM, 7-13 mM, 8-14 mM, 9-15 mM, 0-7 mM, 1-8 mM, 2-9 mM, 3-10 mM, 4-11 mM, 5-12 mM, 6-13 mM, 7-14 mM, 8-15 mM, 0-8 mM, 1-9 mM, 2-10 mM, 3-11 mM, 4-12 mM, 5-13 mM, 6-14 mM, 7-15 mM, 0-9 mM, 1-10 mM, 2-11 mM, 3-12 mM, 4-13 mM, 5-14 mM, 6-15 mM, 0-10 mM, 1-11 mM, 2-12 mM, 3-13 mM, 4-14 mM, 5-15 mM, 0-11 mM, 1-12 mM, 2-13 mM, 3-14 mM, 4-15 mM, 0-12 mM, 1-13 mM, 2-14 mM, 3-15 mM, 0-13 mM, 1-14 mM, 2-15 mM, 0-14 mM, 1-15 mM, or 0-15 mM.

[0722] In certain embodiments, the formulation may comprise 0-10 mM of hydrochloric acid.

[0723] In certain embodiments, the formulation may comprise 6.2-6.3 mM of hydrochloric acid.

[0724] In certain embodiments, the formulation may comprise 8.9-9 mM of hydrochloric acid.

[0725] In certain embodiments, the formulation may comprise 6.2 mM of hydrochloric acid.

[0726] In certain embodiments, the formulation may comprise 6.3 mM of hydrochloric acid.

[0727] In certain embodiments, the formulation may comprise 8.9 mM of hydrochloric acid.

[0728] In certain embodiments, the formulation may comprise 9 mM of hydrochloric acid.

### Sugar

[0729] In certain embodiments, the formulation may comprise at least one sugar and/or sugar substitute.

[0730] In certain embodiments, the formulation may comprise at least one sugar and/or sugar substitute to increase the stability of the formulation. This increase in stability may provide longer hold times for in-process pools, provide a longer “shelf-life”, increase the concentration of AAV particles in solution (e.g., the formulation is able to have higher concentrations of AAV particles without rAAV dropping out of the solution) and/or reduce the generation or formation of aggregation in the formulations.

[0731] In certain embodiments, the inclusion of at least one sugar and/or similar substitute in the formulation may increase the stability of the formulation by 1%, 2%, 3%, 4%, 5%, 10%, 15%, 20%, 25%, 30%, 35%, 40%, 45%, 50%, 55%, 60%, 65%, 70%, 75%, 80%, 85%, 90%, 95%, or more than 95%, 1-5%, 5-15%, 5-20%, 5-25%, 5-30%, 5-35%, 5-40%, 5-45%, 5-50%, 5-55%, 5-60%, 5-65%, 5-70%, 5-75%, 5-80%, 5-85%, 5-90%, 5-95%, 10-20%, 10-25%, 10-30%, 10-35%, 10-40%, 10-45%, 10-50%, 10-55%, 10-60%, 10-65%, 10-70%, 10-75%, 10-80%, 10-85% 0-90%, 10-95%, 15-25%, 15-30%, 15-35%, 15-40%, 15-45%, 15-50%, 15-55%, 15-60% 5-65%, 15-70%, 15-75%, 15-80%, 15-85%, 15-90%, 15-95%, 20-30%, 20-35%, 20-40%, 20-45%, 20-50%, 20-55%, 20-60%, 20-65%, 20-70%, 20-75%, 20-80%, 20-85%, 20-90%, 20-95%, 25-35%, 25-40%, 25-45%, 25-50%, 75-55%, 25-60%, 25-65%, 25-70%, 25-75%, 25-80%, 25-85%, 25-90%, 25-95%, 30-40%, 30-45%, 30-50%, 30-55%, 30-60%, 30-65%, 30-70%, 30-75%, 30-80%, 30-85%, 30-90%, 30-95%, 35-45%, 35-50%, 35-55%, 35-60%, 35-65%, 35-70%, 35-75%, 35-80%, 35-85%, 35-90%, 35-95%, 40-50%, 40-55%, 40-60%, 40-65%, 40-70%, 40-75%, 40-80%, 40-85%, 40-90%, 40-95%, 45-55%, 45-60%, 45-65%, 45-70%, 45-75%, 45-80%, 45-85%, 45-90%, 45-95%, 50-60%, 50-65%, 50-70%, 50-75%, 50-80%, 50-85%, 50-90%, 50-95%, 55-65%, 55-70%, 55-75%, 55-80%, 55-85%, 55-90%, 55-95%, 60-70%, 60-75%, 60-80%, 60-85%, 60-90%, 60-95%, 65-75%, 65-80%, 65-85%, 65-90%, 65-95%, 70-80%, 70-85%, 70-90%, 70-95%, 75-85%, 75-90%, 75-95%, 80-90%, 80-95%, or 90-95% as compared to the same formulation without the sugar and/or sugar substitute.

[0732] In certain embodiments, the sugar and/or sugar substitute is used in combination with a phosphate buffer for increased stability. The combination of the sugar and/or sugar substitute with the phosphate butter may increase stability by 1%, 2%, 3%, 4%, 5%, 10%, 15%, 20%, 25%, 30%, 35%, 40%, 45%, 50%, 55%, 60%, 65%, 70%, 75%, 80%, 85%, 90%, 95%, or more than 95%, 1-5%, 5-15%, 5-20%, 5-25%, 5-30%, 5-35%, 5-40%, 5-45%, 5-50%, 5-55%, 5-60%, 5-65%, 5-70%, 5-75%, 5-80%, 5-85%, 5-90%, 5-95%, 10-20%, 10-25%, 10-30%, 10-35%, 10-40%, 10-45%, 10-50%, 10-55%, 10-60%, 10-65%, 10-70%, 10-75%, 10-80%, 10-85%, 10-90%, 10-95%, 15-25%, 15-30%, 15-35%, 15-40%, 15-45%, 15-50%, 15-55%, 15-60%, 15-65%, 15-70%, 15-75%, 15-80%, 15-85%, 15-90%, 15-95%, 20-30%, 20-35%, 20-40%, 20-45%, 20-50%, 20-55%, 20-60%, 20-65%, 20-70%, 20-75%, 20-80%, 20-85%, 20-90%, 20-95%, 25-35%, 25-40%, 25-45%, 25-50%, 25-55%, 25-60%, 25-65%, 25-70%, 25-75%, 25-80%, 75-85%, 75-90%, 75-95%, 30-40%, 30-45%, 30-50%, 55%, 30-60%, 30-65%, 30-70%, 30-75%, 30-80%, 30-85%, 30-90%, 30-95%, 35-45%, 35-50%, 35-55%, 35-60%, 35-65%, 35-70%, 35-75%, 35-80%, 35-85%, 35-90%, 35-95%, 40-50%, 40-55%, 40-60%, 40-65%, 40-70%, 40-75%, 40-80%, 40-85%, 40-90%, 40-95%, 45-55%.45-60%. 45-65%, 45-70%, 45-75%, 45-80%, 45-85%, 45-90%, 45-95%, 50-60%, 50-65%, 50-70%, 50-75%, 50-80%, 50-85%, 50-90%, 50-95%, 55-65%, 55-70%, 55-75%, 55-80%, 55-85%, 55-90%, 55-95%, 60-70%, 60-75%, 60-80%, 60-85%, 60-90%, 60-95%, 65-75%, 65-80%, 65-85%, 65-90%, 65-95%, -80%, 70-85%, 70-90%, 70-95%, 75-85%, 75-90%, 75-95%, 80-90%, 80-95%, or 90-95% as compared to the same formulation without the sugar and/or sugar substitute. As a non-limiting example, the sugar is sucrose. As another non-limiting example, the sugar is trehalose. As another non-limiting, example, the sugar substitute is sorbitol.

[0733] In certain embodiments, the hold time of the formulation may be increased by 1%, 2%, 3%, 4%, 5%, 10%, 15%, 20%, 25%, 30%, 35%, 40%, 45%, 50%, 55%, 60%, 65%, 70%, 75%, 80%, 85%, 90%, 95%, or more than 95%, 1-5%, 5-15%, 5-20%, 5-25%, 5-30%, 5-35%, 5-40%, 5-45%, 5-50%, 5-55%, 5-60%, 5-65%, 5-70%, 5-75%, 5-80%, 5-85%, 5-90%, 5-95%, 10-20%, 10-25%, 10-30%, 10-35%, 10-40%, 10-45%, 10-50%, 10-55%, 10-60%, 10-65%, 10-70%, 10-75%, 10-80%, 10-85%, 10-90%, 10-95%, 15-25%, 15-30%, 15-35%, 15-40%, 15-45%, 15-50%, 15-55%, 15-60%, 15-65%, 15-70%, 15-75%, 15-80%, 15-85%, 15-90%, 15-95%, 20-30%, 20-35%, 20-40%, 20-45%, 20-50%, 20-55%, 20-60%, 20-65%, 20-70%, 20-75%, 20-80%, 20-85%, 20-90%, 20-95%, 25-35%, 25-40%, 25-45%, 25-50%, 25-55%, 25-60%, 25-65%, 25-70%, 25-75%, 25-80%, 25-85%, 25-90%, 25-95%, 30-40%, 30-45%, 30-50%, 30-55%, 30-60%, 30-65%, 30-70%, 30-75%, 30-80%, 30-85%, 30-90%, 30-95%, 35-45%, 35-50%, 35-55%, 35-60%, 35-65%, 35-70%, 35-75%, 35-80%, 35-85%, 35-90%, 35-95%, 40-50%, 40-55%, 40-60%, 40-65%, 40-70%, 40-75%, 40-80%, 40-85%, 40-90%, 40-95%, 45-55%, 45-60%, 45-65%, 45-70%, 45-75%, 45-80%, 45-85%, 45-90%, 45-95%, 50-60%, 50-65%, 50-70%, 50-75%, 50-80%, 50-85%, 50-90%, 50-95%, 55-65%, 55-70%, 55-75%, 55-80%, 55-85%, 55-90%, 55-95%, 60-70%, 60-75%, 60-80%, 60-85%, 60-90%, 60-95%, 65-75%, 65-80%, 65-85%, 65-90%, 65-95%, 70-80%, 70-85%, 70-90%, 70-95%, 75-85%, 75-90%, 75-95%, 80-90%, 80-95%, or 90-95% as compared to the same formulation without the sugar and/or sugar substitute.

[0734] In certain embodiments, the shelf-life of the formulation may be increased by 1%, 2%, 3%, 4%, 5%, 10%, 15%, 20%, 25%, 30%, 35%, 40%, 45%, 50%, 55%, 60%, 65%, 70%, 75%, 80%, 85%, 90%, 95%, or more than 95%. 1-5%, 5-15%, 5-20%, 5-25%, 5-30%, 5-35%, 5-40%, 5-45%, 5-50%, 5-55%, 5-60%, 5-65%, 5-70%, 5-75%, 5-80%, 5-85%, 5-90%, 5-95%, 10-20%, 10-25%, 10-30%, 10-35%, 10-40%, 10-45%, 10-50%, 10-55%, 10-60%, 10-65%, 10-70%, 10-75%, 10-80%, 10-85%, 10-90%, 10-95%, 15-25%, 15-30%, 15-35%, 15-40%, 15-45%, 15-50%, 15-55%, 15-60%, 15-65%, 15-70%, 15-75%, 15-80%, 15-85%, 15-90%, 15-95%, 20-30%, 20-35%, 20-40%, 20-45%, 20-50%, 20-55%, 20-60%, 20-65%, 20-70%, 20-75%, 20-80%, 20-85%, 20-90%, 20-95%, -5-.?5,©, 25-40%, 25-45%, 25-50%, 25-55%, 25-60%, 25-65%, 75-70%, 75-75%, 75-80%, 75-85%, 75-90%, 75-95%, 30-40%, 30-45%, 30-50%, 30-55%, 30-60%, 30-65%, 30-70%, 30-75%, 30-80%, 30-85%, 30-90%, 30-95%, 35-45%, 35-50%, 35-55%, 35-60%, 35-65%, 35-70%, 35-75%, 35-80%, 35-85%, 35-90%, 35-95%, 40-50%, 40-55%, 40-60%, 40-65%, 40-70%, 40-75%, 40-80%, 40-85%, 40-90%, 40-95%, 45-55%, 45-60%, 45-65%, 45-70%, 45-75%, 45-80%, 45-85%, 45-90%, 45-95%, 50-60%, 50-65%, 50-70%, 50-75%, 50-80%, 50-85%, 50-90%, 50-95%, 55-65%, 55-70%, 55-75%, 55-80%, 55-85%, 55-90%, 55-95%, 60-70%, 60-75%, 60-80%, 60-85%, 60-90%, 60-95%, 65-75%, 65-80%, 65-85%, 65-90%, 65-95%, 70-80%, 70-85%, 70-90%, 70-95%, 75-85%, 75-90%, 75-95%, 80-90%, 80-95%, or 90-95% as compared to the same formulation without the sugar and/or sugar substitute. The shelf-life may he 1. 2, 3, 4, 5, 6, 7, 8, 9, 10, 11, 12, 13, 14, 15, 16, 17, 18, 19, 20, 21, 22, 23, 24 hours, or 1, 2, 3, 4 weeks, or 1, 2, 3, 4, 5, 6, 7, 8, 9, 10, 11, 12, 13, 14, 15, 16, 17, 18, 19, 20, 21, 22, 23, 24 months, or 1, 2, 3, 4, 5, 6, 7 or more than 7 years.

[0735] In certain embodiments, the concentration of the AAV particles in the formulation may be increased by 1%, 2%, 3%, 4%, 5%, 10%, 15%, 20%, 25%, 30%, 35%, 40%, 45%, 50%, 55%, 60%, 65%, 70%, 75%, 80%, 85%, 90%, 95%, or more than 95%, 1-5%, 5-15%, 5-20%, 5-25%, 5-30%, 5-35%, 5-40%, 5-45%, 5-50%, 5-55%, 5-60%, 5-65%, 5-70%, 5-75%, 5-80%, 5-85%, 5-90%, 5-95%, 10-20%, 10-25%, 10-30%, 10-35%, 10-40%, 10-45%, 10-50%, 10-55%, 10-60%, 10-65%, 10-70%, 0-75%, 0-80%, 10-85%, 10-90%, 10-95%, 15-25%, 15-30%, 15-35%, 15-40%, 15-45%, 15-50%, 15-55%, 15-60%, 15-65%, 15-70%, 15-75%, 15-80%, 15-85%, 15-90%, 15-95%, 20-30%, 2035%, 20-40%, 20-45%, 20-50%, 20-55%, 20-60%, 20-65%, 20-70%, 20-75%, 20-80%, 20-85%, 20-90%, 20-95%, 25-35%, 25-40%, 25-45%, 25-50%, 25-55%, 25-60%, 25-65%, 25-70%, ?5-75%, ?5-80%, ?5-85%, 25-90%, 25-95%, 30-40%, 30-45%, 30-50%, 30-55%, 30-60%, 30-65%, 30-70%, 30-75%, 30-80%, 30-85%, 30-90%, 30-95%, 35-45%, 35-50%, 35-55%, 35-60%, 35-65%, 35-70%, 35-75%, 35-80%, 35-85%, 35-90%, 35-95%, 40-50%, 40-55%, 40-60%, 40-65%, 40-70%, 40-75%, 40-80%, 40-85%, 40-90%, 40-95%, 45-55%, 45-60%, 45-65%, 45-70%, 45-75%, 45-80%, 45-85%, 45-90%, 45-95%, 50-60%, 50-65%, 50-70%, 50-75%, 50-80%, 50-85%, 50-90%, 50-95%, 55-65%, 55-70%, 55-75%, 55-80%, 55-85%, 55-90%, 55-95%, 60-70%, 60-75%, 60-80%, 60-85%, 60-90%, 60-95%, 65-75%, 65-80%, 65-85%, 65-90%, 65-95%, 70-80%, 70-85%, 70-90%, 70-95%, 75-85%, 75-90%, 75-95%, 80-90%, 80-95%, or 90-95% as compared to the same formulation without the sugar and/or sugar substitute.

[0736] In certain embodiments, as a result of the addition of a sugar and/or sugar substitute, the formulation generation of aggregates in the formulation may be reduced by 1%, 2%, 3%, 4%, 5%, 10%, 15%, 20%, 25%, 30%, 35%, 40%, 45%, 50%, 55° ,4,, 60%, 65%, 700o, 75%, 80%, 85%, 90%, 95%, or more than 95%, 1-5%, 545%, 5-20%, 5-25%, 5-30%, 5-35%, 5-40%, 5-45%, 5-50%, 5-55%, 5-60%, 5-65%, 5-70%, 5-75%, 5-80%, 5-85%, 5-90%, 5-95%, 10-20%, 10-25%, 10-30%, 10-35%, 10-40%, 10-45%, 10-50%, 10-55%, 10-60%, 10-65%, 10-70%, 10-75%, 10-80⁰o, 10-85%, 10-90%, 10-95%, 15-25%, 15-30%, 15-35%, 15-40%, 15-45%, 15-50%, 15-55%, 15-60%, 15-65%, 15-70%, 15-75%, 15-80%, 15-85%, 15-90%, 15-95%, 20-30%, 20-35%, 20-40%, 20-45%, 20-50%, 20-55%, 20-60%, 20-65%, 20-70%, 20-75%, 20-80%, 20-85%, 20-90%, 20-95%, 25-35%, 25-40%, 25-45%, 25-50%, 25-55%, 25-60%, 25-65%, 25-70%, 25-75%, 25-80%, 25-85%, 25-90%, 25-95%, 30-40%, 30-45%, 30-50%, 30-55%, 30-60%, 30-65%, 30-70%, 30-75%, 30-80%, 30-85%, 30-90%, 30-95%, 35-45%, 35-50%, 35-55%, 35-60%, 35-65%, 35-70%, 35-75%, 35-80%, 35-85%, 35-90%, 35-95%, 40-50%, 40-55%, 40-60%, 40-65%, 40-70%, 40-75%, 40-80%, 40-85%, 40-90%, 40-95%, 45-55%, 45-60⁰. 45-65%, 45-70%, 45-75%, 45-80%, 45-85%, 45-90% 45-95%, 50-60%, 50-65%, 50-70%, 50-75%, 50-80%, 50-85%, 50-90%, 50-95%, 55-65%, 55-70%, 55-75%, 55-80%, 55-85%, 55-90%, 55-95%, 60-70%, 60-75%, 60-80%, 60-85%, 60-90%, 60-95%, 65-75%, 65-80%, 65-85%, 65-90%, 65-95%, 70-80%, 70-85%, 70-90%, 70-95%, 75-85%, 75-90%, 75-95%, 80-90%, 80-95%, or 90-95% as compared to the same formulation without the sugar and/or sugar substitute.

[0737] In certain embodiments, as a result of the addition of a sugar and/or sugar substitute, the formulation or generation of aggregates may be 1%, 2%, 3%, 4%, 5%, 10%, 15%, 20%, 25%, 30%, 350, 40%, 45%, 50%, 55%, 60%, 65%, 70%, 75%, 80%, 85%, 90%. 95%, or more than 95%, 1-5%, 5-15%, 5-20%, 5-25%, 5-30%, 5-35%, 5-40%, 5-45%, 5-50%, 5-55%, 5-60%, 5-65%, 5-70%, 5-75%, 5-80%, 5-85%, 5-90%, 5-95%, 10-20%, 10-25%, 10-30%, 10-35%, 10-40%, 10-45%, 10-50%, 10-55%, 10-60%, 10-65%, 10-70%, 10-75%, 10-80%, 10-85%, 10-90%, 10-95%, 15-25%, 15-30%, 15-35%, 15-40%, 15-45%, 15-50%, 15-55%, 15-60%, 15-65%, 15-70%, 15-75%, 15-80?/0, 15-85%, 15-90%, 15-95%, 20-30%, 20-35%, 20-40%, 20-45%, 20-50%, 20-55%, 20-60%, 20-65%, 20-70%, 20-75%, 20-80%, 20-85%, 20-90%, 20-95%, 25-35%, 25-40%, 25-45%, 25-50%, 25-55%, 25-60%, 25-65%, 25-70%, 25-75%, 25-80%, 25-85%, 25-90%, 25-95%, 30-40%, 30-45%, 30-50%, 30-55%, 30-60%, 30-65%, 30-70%, 30-75%, 30-80%, 30-85%, 30-90%, 30-95%, 35-45%, 35-50%, 35-55%, 35-60%, 35-65%, 35-70%, 35-75%, 35-80%, 35-85⁰, 35-90%, 35-95%, 40-50%, 40-55%, 40-60%, 40-65%, 40-70%, 40-75%, 40-80%, 40-85%, 40-90%, 40-95%, 45-55%, 45-60%, 45-65%, 45-70%, 45-75%, 45-80%, 45-85%, 45-90%, 45-95%, 50-60%, 50-65%, 50-70%, 50-75%, 50-80%, 50-85%, 50-90%, 50-95%, 55-65%, 55-70%, 55-75%, 55-80%, 55-85%, 55-90%, 55-95%, 60-70%, 60-75%, 60-80%, 60-85%, 60-90%, 60-95%, 65-75%, 65-80%, 65-85%, 65-90%, 65-95%, 70-80%, 70-85%, 70-90%, 70-95%, 75-85%, 75-90%, 75-95%, 80-90%, 80-95%, or 90-95% as determined by a method known in the art (e.g., by SLS measurement) and as compared to the same formulation without the sugar and/or sugar substitute. As a non-limiting example, the aggregation of a formulation can be less than 2% by the addition of at least one sugar and/or sugar substitute to the formulation. Additional aggregates can be removed by methods known in the art.

[0738] In certain embodiments, the formulation may comprise a sugar arid/or sugar substitute at 0.1%, 0.2%, 0.3%, 0.4%, 0.5%, 0.6%, 0.7%, 0.8%, 0.9%, 1%, 1.1%, 1.2%, 1.3%, 1.4%, 1.5%, 1.6%, 1.7%, 1.8%, 1.9%, 2%, 2.1%, 2.2%, 2.3%, 2.4%, 2.5%, 2.6%, 2.7%, 2.8%, 2.9%, 3%, 3.1%, 3.2%, 3.3%, 3.4%, 3.5%, 3.6%, 3.7%, 3.8%, 3.9%, 4%, 4.1%, 4.2%, 4.3%, 4.4%, 4.5%, 4.6%, 4.7%, 4.8%, 4.9%, 5%, 5.1%, 5.2%, 5.3%, 5.4%, 5.5%, 5.6%, 5.7%, 5.8%, 5.9%, 6%, 6.1%, 6.2%, 6.3%, 6.4%, 6.5%, 6.6%, 6.7%, 6.8%, 6.9%, 7%, 7.1%, 7.2%, 7.3%, 7.4%, 7.5%, 7.6%, 7.7%, 7.8%, 7.9%, 8%, 8.1%, 8.2%, 8.3%, 8.4%, 8.5%, 8.6%, 8.7%, 8.8%, 8.9%, 9%, 9.1%, 9.2%, 9.3%, 9.4%, 9.5%, 9.6%, 9.7%, 9.8%, 9.9%, or 10% w/v.

[0739] In certain embodiments, the formulation may comprise a sugar and/or sugar substitute in a range of 0-1%, 0.1-1%, 0.2-1%, 0.3-1%, 0.4-1%, 0.5-1%, 0.6-1%, 0.7-1%, 0.8-1%, 0.9-1%, 0-1.5%, 0.1-1.5%, 0.2-1.5%, 0.3-1.5%, 0.4-1.5%, 0.5-1.5%, 0.6-1.5%, 0.7-1.5%, 0.8-1.5%, 0.9-1.5%, 1-1.5%, 1.1-1.5%, 1.2-1.5%, 1.3-1.5%, 1.4-1.5%, 0-2%, 0.1-2%, 0.2-2%, 0.3-2%, 0.4-2%, 0.5-2%, 0.6-2%, 0.7-2%, 0.8-2%, 0.9-2%, 1-2%, 1.1-2%, 1.2-2%, 1.3-2%, 1.4-2%, 1.5-2%, 1.6-2%, 1.7-2%, 1.8-2%, 1.9-2%, 0-2.5%, 0.1-2.5%, 0.2-2.5%, 0.3-2.5%, 0.4-2.5% 0.5-2.5%, 0.6-2.5%, 0.7-2.5%, 0.8-2.5%, 0.9-2.5%, 1-2.5%, 1.1-2.5%, 1.2-2.5%, 1.3-2.5%, 1.4-2.5%, 1.5-2.5%, 1.6-2.5%, 1.7-2.5%, 1.8-2.5%, 19-2.5%, 2-2.5%, 2.1-2.5%, 2.2-2.5%, 2.3-2.5%, 2.4-2.5%, 0-3%, 0.1-3%, 0.2-3%, 0.3-3%, 0.4-3%, 0.5-3%, 0.6-3%, 0.7-3%, 0.8-3%, 0.9-3%, 1-3%, 1.1-3%, 1.2-3%, 1.3-3%, 1.4-3%, 1.5-3%, 1.6-3%, 1.7-3%, 1.8-3%, 1.9-3%, 2-3%, 2.1-3%, 2.2-3%, 2.3-3%, 2.4-3%, 2.5-3%, 2.6-3%, 2.7-3%, 2.8-3%, 2.9-3%, 0-3.5%, 0.1-3.5%, 0.2-3.5%, 0.3-3.5%, 0.4-3.5%, 0.5-3.5%, 0.6-3.5%, 0.7-3.5%, 0.8-3.5%, 0.9-3.5%, 1-3.5%, 1.1-3.5%, 1.2-3.5%, 1.3-3.5%, 1.4-3.5%, 1.5-3.5%, 1.6-3.5%, 1.7-3.5%, 1.8-3.5%, 1.9-3.5%, 2-3.5%, 2.1-3.5%, 2.2-3.5%, 2.3-3.5%, 2.4-3.5%, 2.5-3.5%, 2.6-3.5%, 2.7-3.5%, 2.8-3.5%, 2.9-3.5%, 3-3.5%, 3,1-3,5%, 3.2-3,5%, 3.3-3.5%, 3.4-3.5%, 0-4%, 0.1-4%, 0.2-4%, 0.3-4%, 0.4-4%, 0.5-4%, 0.6-4%, 0.7-4%, 0.8-4%, 0.9-4%, 1-4%, 1.1-4%, 1.2-4%, 1.3-4%, 1.4-4%, 1.5-4%, 1.6-4%, 1.7-4%, 1.8-4%, 19-4%, 2-4%, 2.1-4%, 2.2-4%, 2.3-4%, 2.4-4%, 2.5-4%, 2.6-4%, 2.7-4%, 2.8-4%, 2.9-4%, 3-4%, 3.1-4%, 3.2-4%, 3.3-4%, 3.4-4%, 3.5-4%, 3.6-4%, 3.7-4%, 3.8-4%, 3.9-4%, 0-4.5%, 0.1-4.5%, 0.2-4.5%, 0.3-4.5%, 0.4-4.5%, 0.5-4.5%, 0.6-4.5%, 0.7-4.5%, 0.8-4.5%, 0,9-4,5%, 1-4.5%, 1.1-4.5%, 1.2-4.5%, 1.3-4.5%, 1.4-4.5%, 1.5-4.5%, 1.6-4.5%, 1.7-4.5%, 1.8-4.5%, 1.9-4.5%, 2-4.5%, 2.1-4.5%, 2.2-4.5%, 2.3-4.5%, 2.4-4.5%, 2.5-4.5%, 2.6-4.5%, 2.7-4.5%, 2.8-4.5%, 2.9-4.5%, 3-4.5%, 3.1-4.5%, 3.2-4.5%, 3.3-4.5%, 3.4-4.5%, 3.5-4.5%, 3.6-4.5%, 3.7-4.5%, 3.8-4.5%, 3.9-4.5%, 4-4.5%, 4.1-4.5%, 4.2-4.5%, 4.3-4.5%, 4.4-4.5%, 0-5%, 0.1-5%, 0.2-5%, 0.3-5%, 0.4-5%, 0.5-5%, 0.6-5%, 0.7-5%, 0.8-5%, 0.9-5%, 1-5%, 1.1-5%, 1.2-5%, 1.3-5%, 1.4-5%, 1.5-5%, 1.6-5%, 1.7-5%, 1.8-5%, 1.9-5%, 2-5%, 2.1-5%, 2.2-5%, 2.3-5%, 2.4-5%, 2.5-5%, 2.6-5%, 2.7-5%, 2.8-5%, 2.9-5%, 3-5%, 3.1-5%, 3,2-5%, 3.3-5%, 3,4-5%, 3.5-5%, 3.6-5%, 3.7-5%, 3.8-5%, 3.9-5%, 4-5%, 4.1-5%, 4.2-5%, 4.3-5%, 4.4-5%, 4.5-5%, 4.6-5%, 4.7-5%, 4.8-5%, 4.9-5%, 0-5.5%, 0.1-5.5%, 0.2-5.5%, 0.3-5.5%, 0.4-5.5%, 0.5-5.5%, 0.6-5.5%, 0.7-5.5%, 0.8-5.5%, 0.9-5.5%, 1-5.5%, 1.1-5.5%, 1.2-5.5%, 1.3-5.5%, 1.4-5.5%, 1.5-5.5%, 1.6-5.5%, 1.7-5.5%, 1.8-5.5%, 1.9-5.5%, 2-5,5%, 2.1-5.5%, 2.2-5.5%, 2.3-5.5%, 2.4-5.5%, 2.5-5.5%, 2.6-5.5%, 2.7-5.5%, 2.8-5.5%, 2.9-5.5%, 3-5.5%, 3.1-5.5%, 3.2-5.5%, 3.3-5.5%, 3.4-5.5%, 3.5-5.5%, 3.6-5.5%, 3.7-5.5%, 3.8-5.5%, 3.9-5.5%, 4-5.5%, 4.1-5.5%, 4.2-5.5%, 4.3-5.5%, 4.4-5.5%, 4.5-5.5%, 4.6-5.5%, 4.7-5.5%, 4.8-5.5%, 4.9-5.5%, 5-5.5%, 5.1-5.5%, 5.2-5.5%, 5.3-5.5%, 5.4-5.5%, 0-6%, 0.1-6%, 0.2-6%, 0.3-6%, 0.4-6%, 0.5-6%, 0.6-6%, 0.7-6%, 0.8-6%, 0.9-6%, 1-6%, 1.1-6%, 1.2-6%, 1.3-6%, 1.4-6%, 1.5-6%, 1.6-6%, 1.7-6%, 1.8-6%, 1.9-6%, 2-6%, 2.1-6%, 2.2-6%, 2.3-6%, 2.4-6%, 2.5-6%, 2.6-6%, 2.7-6%, 2.8-6%, 2.9-6%, 3-6%, 3.1-6%, 3.2-6%, 3.3-6%, 3.4-6%, 3.5-6%, 3.6-6%, 3.7-6%, 3.8-6%, 3.9-6%, 4-6%, 4.1-6%, 4.2-6%, 4.3-6%, 4.4-6%, 4.5-6%, 4.6-6%, 4.7-6%, 4.8-6%, 4.9-6%, 5-6%, 5.1-6%, 5.2-6%, 5.3-6%, 5.4-6%, 5.5-6%, 5.6-6%, 5.7-6%, 5.8-6%) 5.9-6%, 0-6.5%, 0.1-6.5%, 0.2-6.5%, 0.3-6.5%, 0.4-6.5%, 0.5-6.5%, 0.6-6.5%, 0.7-6.5%, 0.8-6.5%, 0.9-6.5%, 1-6.5%, 1.1-6.5%, 1.2-6.5%, 1.3-6.5%, 1.4-6.5%, 1.5-6.5%, 1.6-6.5%, 1.7-6.5%, 1,8-65%, 1,9-6,5%, 2-6.5%, 2.1-6.5%, 2.2-6.5%, 2.3-6.5%, 2.4-6.5%, 2.5-6.5%. 2.6-6.5%, 2.7-6.5%, 2.8-6.5%, 2.9-6.5%, 3-6.5%, 3.1-6.5%, 3.2-6.5%, 3.3-6.5%, 3.4-6.5%, 3.5-6.5%, 3.6-6.5%, 3.7-6.5%, 3.8-6.5%, 3.9-6.5%, 4-6.5%, 4.1-6.5%, 4.2-6.5%, 4.3-6.5%, 4.4-6.5%, 4.5-6.5%, 4.6-6.5%, 4.7-6.5%, 4.8-6.5%, 4.9-6.5%, 5-6.5%, 5.1-6.5%, 5.2-6.5%, 5.3-6.5%, 5.4-6.5%, 5.5-6.5%, 5.6-6.5%, 5.7-6.5%, 5.8-6.5%, 5.9-6.5%, 6-6.5%, 6.1-6.5%, 6.2-6.5%, 6.3-6.5%, 6.4-6.5%, 0-7%, 0.1-7%, 0.2-7%, 0.3-7%, 0.4-7%, 0.5-7%, 0.6-7%, 0.7-7%, 0.8-7%, 0.9-7%, 1-7%, 1.1-7%, 1.2-7%, 1.3-7%, 1,4-7%, 1.5-7%, 1.6-7%, 1.7-7%, 1.8-7%, 19-7%, 2-7%, 2.1-7%, 2,2-7%, 2.3-7%, 2.4-7%, 2.5-7%, 2.6-7%, 2.7-7%, 2.8-7%, 2.9-7%, 3-7%, 3.1-7%, 3,2-7%, 3.3-7%, 3.4-7%, 3.5-7%, 3.6-7%, 3.7-7%, 3.8-7%, 3.9-7%, 4-7%, 4.1-7%, 4.2-7%, 4.3-7%, 4.4-7%, 4.5-7%, 4.6-7%, 4.7-7%, 4.8-7%, 4.9-7%, 5-7%, 5,1-7%, 5.2-7%, 5,3-7%, 5.4-7%, 5.5-7%, 5.6-7%, 5.7-7%, 5.8-7%, 5.9-7%, 6-7%, 6.1-7%, 6,2-7%, 6.3-7%, 6,4-7%, 6.5-7%, 6.6-7%, 6.7-7%, 6.8-7%, 6.9-7%, 0-7.5%, 0.1-7.5%, 0.2-7.5%, 0.3-7.5%, 0.4-7.5%, 0.5-7.5%, 0.6-7.5%, 0.7-7.5%, 0.8-7.5%, 0.9-7.5%, 1-7.5%, 1.1-7.5%, 1.2-7.5%, 1.3-7.5%, 1.4-7.5%, 0.5-7.5%, 1.6-7.5%, 1.7-7.5%, 1.8-7.5%, 1.9-7.5%, 2-7.5%, 2.1-7.5%, 2.2-7.5%, 2.3-7.5%, 2.4-7.5%, 2.5-7.5%, 2.6-7.3%, 2.7-7.5%, 2.8-7.5%, 2,9-7,5%, 3-7.5%, 3.1-7.5%, 3.2-7.5%, 3.3-7.5%, 3.4-7.5%, 3.5-7.5%, 3.6-7.5%, 3.7-7.5%, 3.8-7.5%, 3.9-7.5%, 4-7.5%, 4.1-7.5%, 4.2-7.5%, 4.3-7.5%, 4.4-7.5%, 4.5-7.5%, 4.6-7.5%, 4.7-7.5%, 4.8-7.5%, 4.9-7.5%, 5-7.5%, 5.1-7.5%, 5.2-7.5%, 5.3-7.5%, 5.4-7.5%, 5.5-7.5%, 5.6-7.5%, 5.7-7.5%, 5.8-7.5%, 5.9-7.5%, 6-7.5%, 6.1-7.5%, 6.2-7.5%, 6.3-7.5%, 6.4-7.5%, 6.5-7.5%, 6.6-7.5%, 6.7-7.5%, 6.8-7.5%, 6.9-7.5%, 7-7.5%, 7.1-7.5%, 7.2-7.5%, 7.3-7.5%, 7.4-7.5%, 0-8%, 0.1-8%, 0.2-8%, 0.3-8%, 0.4-8%, 0.5-8%, 0.6-8%, 0.7-8%, 0.8-8%, 0.9-8%, 1-8%, 1.1-8%, 1.2-8%, 1.3-8%, 1.4-8%, 1.5-8%, 1.6-8%, 1.7-8%, 1.8-8%, 1.9-8%, 2-8%, 2.1-8%, 2.2-8%, 2.3-8%, 2.4-8%, 2.5-8%, 2.6-8%, 2.7-8%, 2.8-8%, 2.9-8%, 3-8%, 3.1-8%, 3.2-8%, 3.3-8%, 3.4-8%, 3.5-8%, 3.6-8%, 3.7-8%, 3.8-8%, 3.9-8%, 4-8%, 4.1-8%, 4.2-8%, 4.3-8%, 4.4-8%, 4.5-8%, 4.6-8%, 4.7-8%, 4.8-8%, 4.9-8%, 5-8%, 5,1-8%, 5.2-8%, 5,3-8%, 5.4-8%, 5.5-8%, 5.6-8%, 5.7-8%, 5.8-8%, 5.9-8%, 6-8%, 6.1-8%, 6.2-8%, 6.3-8%, 6.4-8%, 6.5-8%, 6.6-8%, 6.7-8%, 6.8-8%, 6.9-8%, 7-8%, 7.1-8%, 7.2-8%, 7.3-8%, 7.4-8%, 7.5-8%, 7.6-8%, 7.7-8%, 7.8-8%, 7.9-8%, 0-8.5%, 0.1-8.5%, 0.2-8.5%, 0.3-8.5%, 0.4-8.5%, 0.5-8,5%, 0.6-8.5%, 0.7-8.5%, 0.8-8.5%, 0.9-8.5%, 1-8.5%, 1.1-8.5%, 1.2-8.5%, 1.3-8.5%, 1,4-8,5%, 1.5-8.5%, 1.6-8.5%, 1.7-8.5%, 1.8-8.5%, 9-8.5%, 2-8.5%, 2.1-8.5%, 2.2-8.5%, 2.3-8.5%, 2.4-8.5%, 2.5-8.5%, 2.6-8.5%, 2.7-8.5%, 2.8-8.5%, 2.9-8.5%, 3-8.5%, 3.1-8.5%, 3.2-8.5%, 3.3-8.5%, 3.4-8.5%, 3.5-8.5%, 3.6-8.5%, 3.7-8.5%, 3.8-8.5%, 3.9-8.5%, 4-8.5%, 4.1-8.5%, 4.2-8.5%, 4.3-8.5%, 4.4-8.5%, 4.5-8.5%, 4.6-8.5%, 4.7-8.5%, 4.8-8.5%, 4.9-8.5%, 5-8.5%, 5.1-8,5%, 5.2-8.5%, 5.3-8.5%, 5.4-8.5%, 5.5-8.5%, 5.6-8.5%, 5.7-8.5%, 5.8-8.5%, 5.9-8.5%, 6-8.5%, 6.1-8.5%, 6.2-8.5%, 6.3-8.5%, 6.4-8.5%, 6.5-8.5%, 6.6-8.5%, 6.7-8.5%, 6.8-8,5%, 6.9-8.5%, 7-8.5%, 7.1-8.5%, 7.2-8,5%, 7.3-8.5%, 7.4-8.5%, 7.5-8.5%, 7.6-8.5%, 7,7-8,5%, 7.8-8.5%, 7.9-8.5%, 8-8.5%, 8,1-8,5%, 8.2-8.5%, 8.3-8.5%, 8.4-8.5%, 0-9%, 0.1-9%, 0.2-9%, 0.3-9%, 0.4-9%, 0.5-9%, 0.6-9%, 0.7-9%, 0.8-9%, 0.9-9%, 1-9%, 1.1-9%, 1.2-9%, 1.3-9%, 1.4-9%, 1.5-9%, 1.6-9%, 1.7-9%, 1.8-9%, 1.9-9%, 2-9%, 2.1-9%, 2.2-9%, 2.3-9%, 2.4-9%, 2.5-9%, 2.6-9%, 2.7-9%, 2.8-9%, 2.9-9%, 3-9%, 3.1-9%, 3.2-9%, 3.3-9%, 3.4-9%, 3.5-9%, 3,6-9%, 3.7-9%, 3.8-9%, 3.9-9%, 4-9%, 4.1-9%, 4.2-9%, 4.3-9%, 4.4-9%, 4.5-9%, 4.6-9%, 4.7-9%, 4.8-9%, 4.9-9%, 5-9%, 5.1-9%, 5.2-9%, 5.3-9%, 5.4-9%, 5.5-9%, 5.6-9%, 5.7-9%, 5.8-9%, 5.9-9%, 6-9%, 6.1-9%, 6.2-9%, 6.3-9%, 6.4-9%, 6.5-9%, 6.6-9%, 6.7-9%, 6.8-9%, 6.9-9%, 7-9%, 7.1-9%, 7.2-9%, 7.3-9%, 7.4-9%, 7.5-9%, 7.6-9%, 7.7-9%, 7.8-9%, 7.9-9%, 8-9%, 8.1-9%, 8.2-9%, 8.3-9%, 8.4-9%, 8.5-9%, 8.6-9%, 8.7-9%, 8.8-9%, 8.9-9%, 0-9.5%, 0.1.-9.5%, 0.2-9.5%, 0.3-9.5%, 0.4-9.5%, 0.5-9.5%, 0.6-9.5%, 0.7-9.5%, 0.8-9.5%, 0.9-9.5%, 1-9.5%, 1.1-9.5%, 1.2-9.5%, 1.3-9.5%, 0.4-9.5%, 1.5-9.5%, 1.6-9.5%, 1.7-9.5%, 1.8-9.5%, 1.9-9.5%, 2-9.5%, 2.1-9.5%, 2.2-9.5%, 2.3-9.5%, 2.4-9.5%, 2.5-9.5%, 2.6-9.5%, 2.7-9.5%, 2.8-9.5%, 2.9-9.5%, 3-9.5%, 3.1-9.5%, 3.2-9.5%, 3.3-9.5%, 3.4-9.5%, 3.5-9.5%, 3.6-9.5%, 3.7-9.5%, 3.8-9.5%, 3.9-9.5%, 4-9.5%, 4.1-9.5%, 4.2-9.5%, 4.3-9.5%, 4.4-9.5%, 4.5-9.5%, 4.6-9.5%, 4.7-9.5%, 4.8-9.5%, 4.9-9.5%, 5-9.5%, 5.1-9.5%, 5.2-9.5%, 5.3-9.5%, 5.4-9.5%, 5.5-9.5%, 5.6-9.5%, 5.7-9.5%, 5.8-9.5%, 5.9-9.5%, 6-9.5%, 6.1-9.5%, 6.2-9.5%, 6.3-9.5%, 6.4-9.5%, 6.5-9.5%, 6.6-9.5%, 6.7-9.5% 6.8-9.5%, 6.9-9.5%, 7-9.5%, 7.1-9.5%, 7.2-9.5%, 7.3-9.5%, 7.4-9.5%, 7.5-9.5%, 7.6-9.5%, 7.7-9.5%, 7.8-9.5%, 7.9-9.5%, 8-9.5%, 8.1-9.5%, 8.2-9.5%, 8.3-9.5%, 8.4-9.5%, 8.5-9.5%, 8.6-9.5%, 8.7-9.5%, 8.8-9.5%, 8.9-9.5%, 9-9.5%, 9.1-9.5%, 9.2-9.5%, 9.3-9.5%, 9.4-9.5%, 0-10%, 0.1-10%, 0.2-10%, 0.3-10%, 0.4-10%, 0.5-10%, 0.6-10%, 0.7-10%, 0.8-10%, 0.9-10%, 1-10%, 1.1-10%, 1.2-10%, 1.3-10%, 1.4-10%, 1.5-10%, 1.6-10%, 1.7-10%, 1.8-10%, 1.9-10%, 2-10%, 2.1-10%, 2.2-10%, 2.3-10%, 2.4-10%, 2.5-10%, 2.6-10%, 2.7-10%, 2.8-10%, 2.9-10%, 3-10%, 3.1-10%, 3.2-10%, 3.3-10%, 3.4-10%, 3.5-10%, 3.6-10%, 3.7-10%, 3.8-10%, 3.9-10%, 4-10%, 4.1-10%, 4.2-10%, 4.3-10% 44-10%, 4.5-10%, 4.6-10%, 4.7-10%, 4.8-10%, 1.9-10%, 5-10%, 5.1-10%, 5.2-10%, 5.3-10%, 5.4-10%, 5.5-10%, 5.6-10%, 5.7-1.0%, 5.8-10%, 5.9-10%, 6-10%, 6.1-10%, 6.2-10%, 6.3-10%, 6.4-10%, 6.5-10%, 6.6-10%, 6.7-10%, 6.8-10%, 6.9-10%, 7-10%, 7.1-10%, 7.2-10%, 7.3-10%, 7.4-10%, 7.5-10%, 7.6-10%, 7.7-10%, 7.8-10%, 7.9-10%, 8-10%, 8.1-10%, 8.2-10%, 8.3-10%, 8.4-10%, 8.5-10%, 8.6-10%, 8.7-10%, 8.8-10%, 8.9-10%, 9-10%, 9.1-10%, 9.2-10%, 9.3-10%, 9.4-10%, 9.5-10%, 9.6-10%, 9.7-10%, 9.8-10%, or 9.9-10%.

[0740] In certain embodiments, the formulation may comprise 0-10% w/v of a sugar and/or sugar substitute.

[0741] In certain embodiments, the formulation may comprise 0-9% w/v of a sugar and/or sugar substitute.

[0742] In certain embodiments, the formulation may comprise 1% w/v of a sugar and/or sugar substitute.

[0743] In certain embodiments, the formulation may comprise 2% w/v of a sugar and/or sugar substitute.

[0744] In certain embodiments, the formulation may comprise 3% w/v of a sugar and/or sugar substitute.

[0745] In certain embodiments, the formulation may comprise 4% w/v of a sugar and/or sugar substitute.

[0746] In certain embodiments, the formulation may comprise 5% w/v of a sugar and/or sugar substitute.

[0747] In certain embodiments, the formulation may comprise 6% w/v of a sugar and/or sugar substitute.

[0748] In certain embodiments, the formulation may comprise 7% w/v of a sugar and/or sugar substitute.

[0749] In certain embodiments, the formulation may comprise 8% w/v of a sugar and/or sugar substitute.

[0750] In certain embodiments, the formulation may comprise 9% w/v of a sugar and/or sugar substitute.

[0751] In certain embodiments, the formulation may comprise 10% w/v of a sugar and/or sugar substitute.

[0752] In certain embodiments, formulations of pharmaceutical compositions described herein may comprise a disaccharide. Suitable disaccharides that may be used in the formulation described herein may comprise sucrose, lactulose, lactose, maltose, trehalose, cellobiose, chitobiose, kojibiose, nigerose, isomaltose, β,β-trehalose, α,β-trehalose, sophorose, laminaribiose, gentiobiose, turanose, maltulose, palatinose, gentiobiulose, mannobiose, melibiose, melibiulose, rutinose, rutinulose, and xylobiose. The concentration of disaccharide (w/v) used in the formulation may be between 1%-15%, for example, between 1%-5%, between 3%-6%, between 5%-8%, between 7%-10%, or between 10%-15%.

[0753] In certain embodiments, formulations of pharmaceutical compositions described herein may comprise a sugar alcohol. As a non-limiting example, the sugar alcohol that may be used in the formulation described herein may comprise sorbitol. The concentration of sugar alcohol (w/v) used in the formulation may be between 1%-15%, for example, between 1%-5%, between 3%-6%, between 5%-8%, between 7%-10%, or between 10%-15%.

### Sucrose

[0754] In certain embodiments, the formulation may comprise at least one sugar which is disaccharide such as, but not limited to, sucrose.

[0755] In certain embodiments, the formulation may comprise sucrose at 0.1%, 0.2%, 0.3%, 0.4%, 0.5%, 0.6%, 0.7%, 0.8%, 0.9%, 1%, 1.1%, 1.2%, 1,3%, 1.4%, 1.5%, 1.6%, 1.7%, 1.8%, 1.9%, 2%, 2.1%, 2.2%, 2.3%, 2.4%, 2.5%, 2.6%, 2.7%, 2.8%, 2.9%, 3%, 3.1%, 3.2%, 3.3%, 3.4%, 3.5%, 3.6%, 3.7%, 3.8%, 3.9%, 4%, 4.1%, 4.2%, 4.3%, 4.4%, 4.5%, 4.6%, 4.7%, 4.8%, 4.9%, 5%, 5.1%, 5.2%, 5.3%,5.4%, 5.5%, 5.6%, 5.7%, 5.8%, 5.9%, 6%, 6.1%, 6.2%, 6.3%, 6.4%, 6.5%, 6.6%, 6.7%, 6.8%, 6.9%, 7%, 7.1%, 7.2%, 7.3%, 7.4%, 7.5%, 7.6%, 7.7%, 7.8%, 7.9%, 8%, 8.1%, 8.2%, 8.3%, 8.4%, 8.5%, 8.6%, 8.7%, 8.8%, 8.9%, 9%, 9.1%, 9.2%, 9.3%, 9.4%, 9.5%, 9.6%, 9.7%, 9.8%, 9.9%, or 10% w/v.

[0756] In certain embodiments, the formulation may comprise sucrose in a range of 0-1%, 0.1-1%, 0.2-1%, 0.3-1%, 0.4-1%, 0.5-1%, 0.6-1%, 0.7-1%, 0.8-1%, 0.9-1%, 0-1.5%, 0.1-1.5%, 0.2-1.5%, 0.3-1.5%, 0.4-1.5%, 0.5-1.5%, 0.6-1.5%, 0.7-1.5%, 0.8-1.5%, 0.9-1.5%, 1-1.5%, 1.1-1.5%, 1.2-1.5%, 1.3-1.5%, 1.4-1.5%, 0-2%, 0.1-2%, 0.2-2%, 0.3-2%, 0.4-2%, 0.5-2%, 0.6-2%, 0.7-2%, 0.8-2%, 0.9-2%, 1-2%, 1.1-2%, 1.2-2%, 1.3-2%, 1.4-2%, 1.5-2%, 1.6-2%, 1.7-2%, 1.8-2%, 1.9-2%, 0-2.5%, 0.1-2.5%, 0.2-2.5%, 0.3-2.5%, 0.4-2.5%, 0.5-2.5%, 0.6-2.5%, 0.7-2.5%, 0.8-2.5%, 0.9-2.5%, 1-2.5%, 1.1-2.5%, 1.2-2.5%, 1.3-2.5%, 1.4-2.5%, 1.5-2.5%, 1.6-2.5%, 1.7-2.5%, 1.8-2.5%. 1.9-2.5%, 2-2.5%, 2.1-2.5%, 2.2-2.5%, 2.3-2.5%, 2.4-2.5%, 0-3%, 0.1-3%, 0.2-3%, 0.3-3%, 0.4-3%, 0.5-3%, 0.6-3%, 0.7-3%, 0.8-3%, 0.9-3%, 1-3%, 1.1-3%, 1.2-3%, 1.3-3%, 1.4-3%, 1.5-3%, 1.6-3%, 1.7-3%, 1.8-3%, 1.9-3%, 2-3%, 2.1-3%, 2.2-3%, 2.3-3%, 2.4-3%, 2.5-3%, 2.6-3%, 2.7-3%, 2.8-3%, 2.9-3%, 0-3.5%, 0.1-3.5%, 0.2-3.5%, 0.3-3.5%, 0.4-3.5%, 0.5-3.5%, 0.6-3.5%, 0.7-3.5%, 0.8-3.5%, 0.9-3.5%, 1-3.5%, 1.1-3.5%, 1.2-3.5%, 1.3-3.5%, 1.4-3.5%, 1.5-3.5%, 1.6-3.5%, 1.7-3.5%, 1.8-3.5%, 1.9-3.5%, 2-3.5%, 2.1-3.5%, 2.2-3.5%, 2.3-3.5%, 2.4-3.5%, 2.5-3.5%, 2.6-3.5%, 2.7-3.5%, 2.8-3.5%, 2.9-3.5%, 3-3.5%, 3.1-3.5%, 3.2-3.5%, 3.3-3.5%, 3.4-3.5%, 0-4%, 0.1-4%, 0.2-4%, 0.3-4%, 0.4-4%, 0.5-4%, 0.6-4%, 0.7-4%, 0.8-4%, 0.9-4%, 1-4%, 1.1-4%, 1.2-4%, 1.3-4%, 1.4-4%, 1.5-4%, 1.6-4%, 1.7-4%, 1.8-4%, 1.9-4%, 2-4%, 2.1-4%, 2.2-4%, 2.3-4%, 2.4-4%, 2.5-4%, 2.6-4%, 2.7-4%, 2.8-4%, 2.9-4%, 3-4%, 3.1-4%, 3.2-4%, 3.3-4%, 3.4-4%, 3.5-4%, 3.6-4%, 3.7-4%, 3.8-4%, 3.9-4%, 0-4.5%, 0.1-45%, 0.2-4.5%, 0.3-4.5%, 0.4-4.5%, 0.5-4.5%, 0.6-4.5%, 0.7-4.5%, 0.8-4.5%, 0.9-4.5%, 1-4.5%, 1.1-4.5%, 1.2-4.5%, 1.3-4.5%, 1.4-4.5%, 1.5-4.5%, 1.6-4.3%, 1.7-4.5%, 1.8-4.5%, 1.9-4.5%, 2-4.5%, 2.1-4.5%, 2.2-4.5%, 2.3-4.5%, 2.4-4.5%, 2.5-4.5%, 2.6-4.5%, 2.7-4.5%, 2.8-4.5%, 2.9-4.5%, 3-4.5%, 3.1-4.5%, 3.2-4.5%, 3.3-4.5%, 3.4-4.5%, 3.5-4.5%, 3.6-4.5%, 3.7-4.5%, 3.8-4.5%, 3.9-4.5%, 4-4.5%, 4.1-4.5%, 4.2-4.5%, 4.3-4.5%, 4.4-4.5%, 0-5%, 0.1-5%, 0.2-5%, 0.3-5%, 0.4-5%, 0.5-5%, 0.6-5%, 0.7-5%, 0.8-5%, 0.9-5%, 1-5%, 1.1-5%, 1,2-5%, 1.3-5%, 1,4-5%, 1.5-5%, 1.6-5%, 1.7-5%, 1.8-5%, 1.9-5%, 2-5%, 2.1-5%, 2.2-5%, 2.3-5%, 2.4-5%, 2.5-5%, 2.6-5%, 2.7-5%, 2.8-5%, 2.9-5%, 3-5%, 3.1-5%, 3.2-5%, 3.3-5%, 3.4-5%, 3.5-5%, 3.6-5%, 3.7-5%, 3.8-5%, 3.9-5%, 4-5%, 4.1-5%, 4.2-5%, 4.3-5%, 4.4-5%, 4.5-5%, 4.6-5%, 4.7-5%, 4.8-5%, 4.9-5%, 0-5.5%, 0.1-5.5%, 0.2-5.5%, 0.3-5.5%, 0.4-5.5%, 0.5-5.5%, 0.6-5.5%, 0.7-5.5%, 0.8-5.5%, 0.9-5.5%, 1-5.5%, 1.1-5.5%, 1.2-5.5%, 1.3-5.5%, 1.4-5.5%, 1.5-5.5%, 1.6-5.5%, 1.7-5.5%, 1.8-5.5%, 1.9-5.5%, 2-5.5%, 2.1-5.5%, 2.2-5.5%, 2.3-5.5%, 2.4-5.5%, 2.5-5.5%, 2.6-5.5%, 2.7-5.5%, 2.8-5.5%, 2.9-5.5%, 3-5.5%, 3.1-5.5%, 3.2-5.5%, 3.3-5.5%, 3.4-5.5%, 3.5-5.5%, 3.6-5.5%, 3.7-5.5%, 3.8-5.5%, 3.9-5.5%, 4-5.5%, 4.1-5.5%, 4.2-5.5%, 4.3-5.5%, 4.4-5.5%, 4.5-5.5%, 4.6-5.5%, 4.7-5.5%, 4.8-5.5%, 4.9-5.5%, 5-5.5%, 5.1-5.5%, 5.2-5.5%, 5.3-5.5%, 5.4-5.5%, 0-6%, 0.1-6%, 0.2-6%, 0.3-6%, 0.4-6%, 0.5-6%, 0.6-6%, 0.7-6%, 0.8-6%, 0.9-6%, 1-6%, 1.1-6%, 1.2-6%, 1.3-6%, 1.4-6%, 1.5-6%, 1.6-6%, 1.7-6%, 1.8-6%, 1.9-6%, 2-6%, 2.1-6%, 2.2-6%, 2.3-6%, 2.4-6%, 2.5-6%, 2.6-6%, 2.7-6%, 2.8-6%, 2.9-6%, 3-6%, 3.1-6%, 3.2-6%, 3.3-6%, 3.4-6%, 3.5-6%, 3.6-6%, 3.7-6%, 3.8-6%, 3.9-6%, 4-6%, 4.1-6%, 4.2-6%, 4.3-6%, 4.4-6%, 4.5-6%, 4.6-6%, 4.7-6%, 4.8-6%, 4.9-6%, 5-6%, 5.1-6%, 5.2-6%, 5.3-6%, 5.4-6%, 5.5-6%, 5.6-6%, 5.7-6%, 5.8-6%, 5.9-6%, 0-6,5%, 01-65%, 0.2-6.5%, 0.3-6.5%, 0.4-6.5%, 0.5-6.5%, 0.6-6.5%, 0.7-6.5%, 0.8-6.5%, 0.9-6.5%, 1-6.5%, 1.1-6.5%, 1.2-6.5%, 1.3-6.5%, 1.4-6.5%, 1.5-6.5%, 1.6-6.5%, 1.7-6.5%, 1.8-6.5%, 1.9-6.5%, 2-6.5%, 2.1-6.5%, 2.2-6.5%, 2.3-6.5%, 2.4-6.5%, 2.5-6.5%, 2.6-6.5%, 2.7-6.5%, 2.8-6.5%, 2.9-6.5%, 3-6,5%, 3.1-6.5%, 3.2-6.5%, 3.3-6.5%, 3.4-6.5%, 3,5-6,5%, 3.6-6.5%, 3.7-6.5%, 3.8-6.5%, 3.9-6.5%, 4-6.5%, 4.1-6.5%, 4.2-6.5%, 4.3-6.5%, 4.4-6.5%, 4.5-6.5%, 4.6-6.5%, 4.7-6.5%, 4.8-6.5%, 4.9-6.5%, 5-6.5%, 5.1-6.5%, 5.2-6.5%, 5.3-6.5%, 5.4-6.5%, 5.5-6.5%, 5.6-6.5%, 5.7-6.5%, 5.8-6.5%, 5.9-6.5%, 6-6.5%, 6.1-6.5%, 6.2-6.5%, 6.3-6.5%, 6.4-6.5%, 0-7%. 0.1-7%, 0.2-7%, 0.3-7%, 0.4-7%, 0.5-7%, 0.6-7%, 0.7-7%, 0,8-7%, 0.9-7%, 1-7%, 1.1-7%, 1.2-7%, 1.3-7%, 1.4-7%, 1.5-7%, 1.6-7%, 1.7-7%, 1.8-7%, 1.9-7%, 2-7%, 2.1-7%, 2.2-7%, 2.3-7%, 2.4-7%, 2.5-7%, 2.6-7%, 2.7-7%, 2.8-7%, 2.9-7%, 3-7%, 3.1-7%, 3.2-7%, 3.3-7%, 3.4-7%, 3.5-7%, 3.6-7%, 3.7-7%, 3.8-7%, 3.9-7%, 4-7%, 4.1-7%, 4.2-7%, 4.3-7%, 4.4-7%, 4.5-7%, 4.6-7%, 4.7-7%, 4.8-7%, 4.9-7%, 5-7%, 5.1-7%, 5.2-7%, 5.3-7%, 5.4-7%, 5.5-7%, 5.6-7%, 5.7-7%, 5.8-7%, 5.9-7%, 6-7%, 6.1-7%, 6.2-7%, 6.3-7%, 6.4-7%, 6.5-7%, 6.6-7%, 6.7-7%, 6.8-7%, 6.9-7%, 0-7.5%, 0.1-7.5%, 0.2-7.5%, 0.3-7.5%, 0.4-7.5%, 0.5-7.5%, 0.6-7.5%, 0.7-7.5%, 0.8-7.5%, 0.9-7.5%, 1-7.5%, 1.1-7.5%, 1.2-7.5%, 1.3-7.5%, 1.4-7.5%, 1.5-7.5%, 1.6-7.5%, 1.7-7.5%, 1.8-7.5%, 1.9-7.5%, 2-7.5%, 2.1-7.5%,2.2-7.5%, 2.3-7.5%, 2.4-7.5%, 2.5-7.5%, 2.6-7.5%, 2.7-7.5%, 2.8-7.5%, 2.9-7.5%, 3-7.5%, 3.1-7.5%, 3.2-7.5%, 3.3-7.5%, 3.4-7.5%, 3.5-7.5%, 3.6-7.5%, 3.7-7.5%, 3.8-7.5%, 3.9-7.5%, 4-7.5%, 4.1-7.5%, 4.2-7.5%, 4.3-7.5%, 4.4-7.5%, 4.5-7.5%, 4.6-7.5%, 4.7-7.5%, 4.8-7.5%, 4.9-7.5%, 5-7.5%, 5.1-7.5%, 5.2-7.5%, 5.3-7.5%, 5.4-7.5%, 5.5-7.5%, 5.6-7.5%, 5.7-7.5%, 5.8-7.5%, 5.9-7.5%, 6-7.5%, 6.1-7.5%, 6.2-7.5%, 6.3-7.5%, 6.4-7.5%, 6.5-7.5%, 6.6-7.5%, 6.7-7.5%, 6.8-7.5%, 6.9-7.5%, 7-7.5%, 7.1-7.5%, 7.2-7.5%, 7.3-7.5%, 7.4-7.5%, 0-8%, 0.1-8%, 0.2-8%, 0.3-8%, 0.4-8%, 0.5-8%, 0.6-8%, 0.7-8%, 0.8-8%, 0.9-8%, 1-8%, 1.1-8%, 1.2-8%, 1.3-8%, 1.4-8%, 1.5-8%, 1.6-8%, 1.7-8%, 1.8-8%, 1.9-8%, 2-8%, 2.1-8%, 2.2-8%, 2.3-8%, 2.4-8%, 2.5-8%, 2.6-8%, 2.7-8%, 2.8-8%, 2.9-8%, 3-8%, 3.1-8%, 3.2-8%, 3.3-8%, 3.4-8%, 3.5-8%, 3.6-8%, 3.7-8%, 3.8-8%, 3.9-8%, 4-8%, 4.1-8%, 4.2-8%, 4.3-8%, 4.4-8%, 4.5-8%, 4.6-8%, 4.7-8%, 4.8-8%, 4.9-8%, 5-8%, 5.1-8%, 5.2-8%, 5.3-8%, 5.4-8%, 5.5-8%, 5.6-8%, 5.7-8%, 5.8-8%, 5.9-8%, 6-8%, 6.1-8%, 6.2-8%, 6.3-8%, 6.4-8%, 6.5-8%, 6.6-8%, 6.7-8%, 6.8-8%, 6.9-8%, 7-8%, 7.1-8%, 7.2-8%, 7.3-8%, 7.4-8%, 7.5-8%, 7.6-8%, 7.7-8%, 7.8-8%, 7.9-8%, 0-8.5%, 0.1-8.5%, 0.2-8.5%. 0.3-8.5%, 0.4-8.5%, 0.5-8.5%, 0.6-8.5%, 0.7-8.5%, 0.8-8.5%, 0.9-8.5%, 1-8.5%, 1.1-8.5%, 1.2-8.5%, 1.3-8.5%, 1.4-8.5%, 1.5-8.5%, 1.6-8.5%, 1.7-8.5%, 1.8-8.5%, 1.9-8.5%, 2-8.5%, 2.1-8.5%, 2.2-8.5%, 2.3-8.5%, 2.4-8.5%, 2.5-8.5%, 2.6-8.5%, 2.7-8.5%, 2.8-8.5%, 2.9-8.5%, 3-8.5%, 3.1-8.5%, 3.2-8.5%, 3.3-8.5%, 3.4-8.5%, 3.5-8.5%, 3.6-8.5%, 3.7-8.5%, 3.8-8.5%, 3.9-8.5%, 4-8.5%, 4.1-8.5%, 4.2-8.5%, 4.3-8.5%, 4.4-8.5%, 4.5-8.5%, 4.6-8.5%, 4.7-8.5%, 4.8-8.5%, 4.9-8.5%, 5-8.5%. 5.1-8.5%, 5.2-8.5%, 5.3-8.5%, 5.4-8.5%, 5.5-8.5%, 5.6-8.5%, 5.7-8.5%, 5.8-8.5%, 5.9-8.5%, 6-8.5%, 6.1-8.5%, 6.2-8.5%, 6.3-8.5%, 6.4-8.5%, 6.5-8.5%, 6.6-8.5%, 6.7-8.5%, 6.8-8.5%, 6.9-8.5%, 7-8.5%, 7.1-8.5%, 7.2-8.5%, 7.3-8.5%, 7.4-8.5%, 7.5-8.5%, 7.6-8.5%, 7.7-8.5%, 7.8-8.5%, 7.9-8.5%, 8-8.5%, 8.1-8.5%, 8.2-8.5%, 8.3-8.5%, 8.4-8.5%, 0-9%, 0.1-9%, 0.2-9%, 0.3-9%, 0.4-9%, 0.5-9%, 0.6-9%, 0.7-9%, 0.8-9%, 0.9-9%, 1-9%, 1.1-9%, 1.2-9%, 1.3-9%, 1.4-9%, 1.5-9%, 1.6-9%, 1.7-9%, 1.8-9%, 1.9-9%, 2-9%, 2.1-9%, 2.2-9%, 2.3-9%, 2.4-9%, 2.5-9%, 2.6-9%, 2.7-9%, 2.8-9%, 2.9-9%, 3-9%, 3.1-9%, 3.2-9%, 3.3-9%, 3.4-9%, 3.5-9%, 3.6-9%, 3.7-9%, 3.8-9%, 3.9-9%, 4-9%, 4.1-9%, 4.2-9%, 4.3-9%, 4.4-9%, 4.5-9%, 4.6-9%, 4.7-9%, 4.8-9%, 4.9-9%, 5-9%, 5.1-9%, 5.2-9%, 5.3-9%, 5.4-9%, 5.5-9%, 5.6-9%, 5.7-9%, 5.8-9%, 5.9-9%, 6-9%, 6.1-9%, 6.2-9%, 6.3-9%, 6.4-9%, 6.5-9%, 6.6-9%, 6.7-9%, 6.8-9%, 6.9-9%, 7-9%, 7.1-9%, 7.2-9%, 7.3-9%, 7.4-9%, 7.5-9%, 7.6-9%, 7.7-9%, 7.8-9%, 7.9-9%, 8-9%, 8.1-9%, 8.2-9%, 8.3-9%, 8.4-9%, 8.5-9%, 8.6-9%, 8.7-9%, 8.8-9%, 8.9-9%, 0-9.5%, 0.1-9.5%, 0.2-9.5%, 0,3-9,5%, 0.4-9.5%, 0.5-9.5%, 0.6-9.5%, 0.7-9.5%, 0.8-9.5%, 0.9-9.5%, 1-9.5%, 1.1-9.5%, 1.2-9.5%, 1.3-9.5%, 1.4-9.5%, 1.5-9.5%, 1.6-9.5%, 1.7-9.5%, 1.8-9.5%, 1.9-9.5%, 2-9.5%, 2.1-9.5%, 2.2-9.5%, 2.3-9.5%, 2.4-9.5%, 2.5-9.5%, 2.6-9.5%, 2.7-9.5%, 2.8-9.5%, 2.9-9.5%, 3-9.5%, 3.1-9.5%, 3.2-9.5%, 3.3-9.5%, 3.4-9.5%, 3.5-9.5%, 3.6-9.5%, 3.7-9.5%, 3.8-9.5%, 3.9-9.5%, 4-9.5%, 4.1-9.5%, 4.2-9.5%, 4.3-9.5%, 4.4-9.5%, 4.5-9.5%, 4.6-9.5%, 4.7-9.5%, 4.8-9.5%, 4.9-9.5%, 5-9.5%, 5.1-9.5%, 5.2-9.5%, 5.3-9.5%, 5.4-9.5%, 5.5-9.5%, 5.6-9.5%, 5.7-9.5%, 5.8-9.5%, 5.9-9.5%, 6-9.5%, 6.1-9.5%, 6.2-9.5%, 6.3-9.5%, 6.4-9.5%, 6.5-9.5%, 6.6-9.5%, 6.7-9.5%, 6.8-9.5%, 6.9-9.5%, 7-9.5%, 7.1-9.5%, 7.2-9.5%, 7.3-9.5%, 7.4-9.5%, 7.5-9.5%, 7.6-9.5%, 7.7-9.5%, 7.8-9.5%, 7.9-9.5%, 8-9.5%, 8.1-9.5%, 8.2-9.5%, 8.3-9.5%, 8.4-9.5%, 8,5-9.5%, 8.6-9.5%, 8.7-9.5%, 8.8-9.5%, 8.9-9.5%, 9-9.5%, 9.1-9.5%, 9.2-9.5%, 9.3-9.5%, 9.4-9.5%, 0-10%, 0.1-10%, 0.2-10%, 0.340%, 0.4-10%, 0.5-10%, 0.6-10%, 0.7-10%, 0.8-10%, 0.9-10%, 1-10%, 1.1-10%, 1.2-10%, 1.3-10%, 1.4-10%, 1.5-10%, 1.6-10%, 1.7-10%, 1.8-10%, 1.9-10%, 2-10%, 2.1-10%, 2.2-10%, 2.3-10%, 2.4-10%, 2.5-10%, 2.6-10%, 2.7-10%, 2.8-10%, 2.9-10%, 3-10%, 3.1-10%, 3.2-10%, 3.3-10%, 3.440%, 3.5-10%, 3.6-10%, 3.7-10%, 3.8-10%, 3.9-10%, 4-10%, 4.1-10%, 4.2-10%, 4.3-10%, 4.4-10%, 4.5-10%, 4.6-10%, 4.7-10%, 4.8-10%, 4.9-10%, 5-10%, 5.1-10%, 5.2-10%, 5.3-10%, 5.4-10%, 5.5-10%, 5.6-10%, 5.7-10%, 5.8-10%, 5.9-10%, 6-10%, 6.1-10%, 6.2-10%, 6.3-10%, 6.4-10%, 6.5-10%, 6.6-10%, 6.7-10%, 6.8-10%, 6.9-10%, 7-10%, 7.1-10%, 7.2-10%, 7.3-10%, 7.4-10%, 7.5-10%, 7.6-10%, 7.7-10%, 7.8-10%, 7.9-10%, 8-10%, 8.1-10%, 8.2-10%, 8.3-10%, 8.4-10%, 8.5-10%, 8.6-10%, 8.7-10%, 8.8-10%, 8.9-10%, 9-10%, 9.1-10%, 9.2-10%, 9.3-10%, 9.4-10%, 9.5-10%, 9.6-10%, 9.7-10%, 9.8-10%, or 9.940% w/v.

[0757] In certain embodiments, the formulation may comprise 0-10% w/v of sucrose.

[0758] In certain embodiments, the formulation may comprise 0-9% w/v of sucrose.

[0759] In certain embodiments, the formulation may comprise 0-8% w/v of sucrose.

[0760] In certain embodiments, the formulation may comprise 0-7% w/v of sucrose.

[0761] In certain embodiments, the formulation may comprise 0-6% w/v of sucrose.

[0762] In certain embodiments, the formulation may comprise 0-5% w/v of sucrose.

[0763] In certain embodiments, the formulation may comprise 0-4% w/v of sucrose.

[0764] In certain embodiments, the formulation may comprise 0-3% w/v of sucrose.

[0765] In certain embodiments, the formulation may comprise 0-2% w/v of sucrose.

[0766] In certain embodiments, the formulation may comprise 0-1% w/v of sucrose.

[0767] In certain embodiments, the formulation may comprise 1% w/v of sucrose.

[0768] In certain embodiments, the formulation may comprise 2% w/v of sucrose.

[0769] In certain embodiments, the formulation may comprise 3% w/v of sucrose.

[0770] In certain embodiments, the formulation may comprise 4% w/v of sucrose.

[0771] In certain embodiments, the formulation may comprise 5% w/v of sucrose.

[0772] In certain embodiments, the formulation may comprise 6% w/v of sucrose.

[0773] In certain embodiments, the formulation may comprise 7% w/v of sucrose.

[0774] In certain embodiments, the formulation may comprise 8% w/v of sucrose.

[0775] In certain embodiments, the formulation may comprise 9% w/v of sucrose.

[0776] In certain embodiments, the formulation may comprise 10% w/v of sucrose.

### Trehalose

[0777] In certain embodiments, the formulation may comprise at least one sugar which is disaccharide such as, but not limited to, trehalose.

[0778] In certain embodiments, the formulation may comprise trehalose at 0.1%, 0.2%, 0.3%, 0.4%, 0.5%, 0.6%, 0.7%, 0.8%, 0.9%, 1%, 1.1%, 1.2%, 1.3%, 1.4%, 1.5%, 1.6%, 1.7%, 1.8%, 1.9%, 2%, 2.1%, 2.2%, 2.3%, 2.4%, 2.5%, 2.6%, 2.7%, 2.8%, 2.9%, 3%, 3.1%, 3.2%, 3.3%, 3.4%, 3.5%, 3.6%, 3.7%, 3.8%, 3.9%, 4%, 4.1%, 4.2%, 4.3%, 4.4%, 4.5%, 4.6%, 4.7%, 4.8%, 4.9%, 5%, 5.1%, 5.2%, 5.3%, 5.4%, 5.5%, 5.6%, 5.7%, 5.8%, 5.9%, 6%, 6.1%, 6.2%, 6.3%, 6.4%, 6.5%, 6.6%, 6.7%, 6.8%, 6.9%, 7%, 7.1%, 7.2%, 7.3%, 7.4%, 7.5%, 7.6%, 7.7%, 7.8%, 7.9%, 8%, 8.1%, 8.2%, 8.3%, 8.4%, 8.5%, 8.6%, 8.7%, 8.8%, 8.9%, 9%, 9.1%, 9.2%, 9.3%, 9.4%, 9.5%, 9.6%, 9.7%, 9.8%, 9.9%, or 10% w/v.

[0779] In certain embodiments, the formulation may comprise trehalose in a range of 0-1%, 0.1-1%, 0.2-1%, 0.3-1%, 0.4-1%, 0.5-1%, 0.6-1%, 0.7-1%, 0.8-1%, 0.9-1%, 0-1.5%, 0.1-1.5%, 0.2-1.5%, 0.3-1.5%, 0.4-1.5%, 0.5-1.5%, 0.6-1.5%, 0.7-1.5%, 0.8-1.5%, 0.9-1.5%, 1-1.5%, 1.1-1.5%, 1.2-1.5%, 1.3-1.5%, 1.4-1.5%, 0-2%, 0.1-2%, 0.2-2%, 0.3-2%, 0.4-2%, 0.5-2%, 0.6-2%, 0.7-2%, 0.8-2%, 0.9-2%, 1-2%, 1,1-2%, 1.2-2%, 1.3-2%, 1.4-2%, 1.5-2%, 1.6-2%, 1.7-2%, 1.8-2%, 1.9-2%, 0-2.5%, 0.1-2.5%, 0.2-2.5%, 0.3-2.5%, 0.4-2.5%, 0.5-2.5%, 0.6-2.5%, 0.7-2.5%, 0.8-2.5%, 0.9-2.5%, 1-2.5%, 1.1-2.5%, 1.2-2.5%, 1.3-2.5%, 1.4-2.5%, 1.5-2.5%, 1.6-2.5%, 1.7-2.5%, 1.8-2.5%, 1.9-2.5%, 2-2.5%, 2.1-2.5%, 2.2-2.5%, 2.3-2.5%, 2.4-2.5%, 0-3%, 0.1-3%, 0.2-3%, 0.3-3%, 0.4-3%, 0.5-3%, 0.6-3%, 0.7-3%, 0.8-3%, 0.9-3%, 1-3%, 1.1-3%, 1.2-3%, 1.3-3%, 1.4-3%, 1.5-3%, 1.6-3%, 1.7-3%, 1.8-3%, 1.9-3%, 2-3%, 2.1-3%, 2.2-3%, 2.3-3%, 2.4-3%, 2.5-3%, 2.6-3%, 2.7-3%, 2.8-3%, 2.9-3%, 0-3.5%, 0.1-3.5%, 0.2-35%, 0.3-3.5%, 0.4-3.5%, 0.5-3.5%, 0.6-3.5%, 0.7-3.5%, 0.8-3.5%, 0.9-3.5%, 1-3.5%, 1.1-3.5%, 1.2-3.5%, 1.3-3.5%, 1.4-3.5%, 1.5-3.5%, 1.6-3.5%, 1.7-3.5%, 1.8-3.5%, 1.9-3.5%, 2-3.5%, 2.1-3.5%, 2.2-3.5%, 2.3-3.5%, 2.4-3.5%, 2.5-3.5%, 2.6-3.5%, 2.7-3.5%, 2.8-3.5%, 2.9-3.5%, 3-3.5%, 3.1-3.5%, 3.2-3.5%, 3.3-3.5%, 3.4-3.5%, 0-4%, 0.1-4%, 0.2-4%, 0.3-4%, 0.4-4%, 0.5-4%, 0.6-4%, 0.7-4%, 0.8-4%, 0.9-4%, 1-4%, 1.1-4%, 1.2-4%, 1.3-4%, 1.4-4%, 1.5-4%, 1.6-4%, 1.7-4%, 1.8-4%, 1.9-4%, 2-4%, 2.1-4%, 2.2-4%, 2.3-4%, 2.4-4%, 2.5-4%, 2.6-4%, 2.7-4%, 2.8-4%, 2.9-4%, 3-4%, 3.1-4%, 3.2-4%, 3.3-4%, 3.4-4%, 3.5-4%, 3.6-4%, 3.7-4%, 3.8-4%, 3.9-4%, 0-4.5%, 0.1-4.5%, 0.2-4.5%, 0.3-4.5%, 0.4-4.5%, 0.5-4.5%, 0.6-4.5%, 0.7-4.5%, 0.8-4.5%, 0.9-4.5%, 1-4.5%, 1.1-4.5%, 1.2-4.5%, 1.3-4.5%, 1.4-4.5%, 1.5-4.5%, 1.6-4.5%, 1.7-4.5%, 1.8-4.5%, 1.9-4.5%, 2-4.5%, 2.1-4.5%, 2.2-4.5%, 2.3-4.5%, 2.4-4.5%, 2.5-4.5%, 2.6-4.5%, 2.7-4.5%, 2.8-4.5%, 2.9-4.5%, 3-4.5%, 3.1-4.5%, 3.2-4.5%, 3.3-4.5%, 3.4-4.5%, 3.5-4.5%, 3.6-4.5%, 3.7-4.5%, 3.8-4.5%, 3.9-4.5%, 4-4.5%, 4.1-4.5%, 4.2-4.5%, 4.3-4.5%, 4.4-4.5%, 0-5%, 0.1-5%, 0.2-5%, 0.3-5%, 0.4-5%, 0.5-5%, 0.6-5%, 0.7-5%, 0.8-5%, 0.9-5%, 1-5%, 1.1-5%, 1.2-5%, 1.3-5%, 1.4-5%, 1.5-5%, 1.6-5%, 1.7-5%, 1.8-5%, 1.9-5%, 2-5%, 2.1-5%, 2.2-5%, 2.3-5%, 2.4-5%, 2.5-5%, 2.6-5%, 2.7-5%, 2.8-5%, 2.9-5%, 3-5%, 3.1-5%, 3.2-5%, 3.3-5%, 3.4-5%, 3.5-5%, 3.6-5%, 3.7-5%, 3.8-5%, 3.9-5%, 4-5%, 4.1-5%, 4.2-5%, 4.3-5%, 4.4-5%, 4.5-5%, 4.6-5%, 4.7-5%, 4.8-5%, 4.9-5%, 0-5.5%, 0.1-5.5%, 0.2-5.5%, 0.3-5.5%, 0.4-5.5%, 0.5-5.5%, 0.6-5.5%, 0.7-5.5%, 0.8-5.5%, 0.9-5.5%, 1-5.5%, 1.1-5.5%, 1.2-5.5%, 1.3-5.5%, 1.4-5.5%, 1.5-5.5%, 1.6-5.5%, 1.7-5.5%, 1.8-5.5%, 1.9-5.5%, 2-5.5%, 2.1-5.5%, 2.2-5.5%, 2.3-5.5%, 2.4-5.5%, 2.5-5.5%, 2.6-5.5%, 2.7-5.5%, 2.8-5.5%, 2.9-5.5%, 3-5.5%, 3.1-5.5%, 3.2-5.5%, 3.3-5.5%, 3.4-5.5%, 3.5-5.5%, 3.6-5.5%, 3.7-5.5%, 3.8-5.5%, 3.9-5.5%, 4-5.5%, 4.1-5.5%, 4.2-5.5%, 4.3-5.5%, 4.4-5.5%, 4.5-5.5%, 4.6-5.5%, 4.7-5.5%, 4.8-5.5%, 4.9-5.5%, 5-5.5%, 5.1-5.5%, 5.2-5.5%, 5.3-5.5%, 5.4-5.5%, 0-6%, 0.1-6%, 0.2-6%, 0.3-6%, 0.4-6%, 0.5-6%, 0.6-6%, 0.7-6%, 0.8-6%, 0.9-6%, 1-6%, 1.1-6%, 1.2-6%, 1.3-6%, 1.4-6%, 1.5-6%, 1.6-6%, 1.7-6%, 1.8-6%, 1.9-6%, 2-6%, 2.1-6%, 2.2-6%, 2.3-6%, 2.4-6%, 2.5-6%, 2.6-6%, 2.7-6%, 2.8-6%, 2.9-6%, 3-6%, 3.1-6%, 3.2-6%, 3.3-6%, 3.4-6%, 3.5-6%, 3.6-6%, 3.7-6%, 3.8-6%, 3.9-6%, 4-6%, 4.1-6%, 4.2-6%, 4.3-6%, 4.4-6%, 4.5-6%, 4.6-6%, 4.7-6%, 4.8-6%, 4.9-6%, 5-6%, 5.1-6%, 5.2-6%, 5.3-6%, 5.4-6%, 5.5-6%, 5.6-6%, 5.7-6%, 5.8-6%, 5.9-6%, 0-6,5%, 0.1-6.5%, 0.2-6.5%, 0.3-6.5%, 0.4-6.5% 0.6-6.5%, 0.7-6.5%, 0.8-6.5%, 0.9-6.5%, 1-6.5%, 1.1-6.5%, 1.2-6.5%, 1.3-6.5%, 1.4-6.5%, 1.5-6.5%, 1.6-6.5%, 1.7-6.5%, 1.8-6.5%, 1.9-6.5%, 2-6.5%, 2.1-6.5%, 2.2-6.5%, 2.3-6.5%, 2.4-6.5%, 2.5-6.5%, 2.6-6.5%, 2.7-6.5%, 2.8-6.5%, 2.9-6.5%, 3-6.5%, 3.1-6.5%, 3.2-6.5%, 3.3-6.5%, 3.4-6.5%. 3.5-6.5%, 3.6-6.5%, 3.7-6.5%, 3.8-6.5%, 3.9-6.5%, 4-6.5%, 4.1-6.5%, 4.2-6.5%, 4.3-6.5%, 4.4-6.5%, 4.5-6.5%, 4.6-6.5%, 4.7-6.5%, 4.8-6.5%, 4.9-6.5%, 5-6.5%, 5.1-6.5%, 5.2-6.5%, 5.3-6.5%, 5.4-6.5%, 5.5-6.5%, 5.6-6.5%, 5.7-6.5%, 5.8-6.5%, 5.9-6.5%, 6-6.5%, 6.1-6.5%, 6.2-6.5%, 6.3-6.5%, 6.4-6.5%, 0-7%, 0.1-7%, 0.2-7%, 0.3-7%, 0.4-7%, 0.5-7%, 0.6-7%, 0.7-7%, 0.8-7%, 0.9-7%, 1-7%, 1.1-7%, 1.2-7%, 1.3-7%, 1.4-7%, 1.5-7%, 1.6-7%, 1.7-7%, 1.8-7%, 1.9-7%, 2-7%, 2.1-7%, 2.2-7%, 2.3-7%, 2.4-7%, 2.5-7%, 2.6-7%, 2.7-7%, 2.8-7%, 2.9-7%, 3-7%, 3.1-7%, 3.2-7%, 3.3-7%, 3.4-7%, 3.5-7%, 3.6-7%, 3.7-7%, 3.8-7%, 3.9-7%, 4-7%, 4.1-7%, 4.2-7%, 4.3-7%, 4.4-7%, 4.5-7%, 4.6-7%, 4.7-7%, 4.8-7%, 4.9-7%, 5-7%, 5.1-7%, 5.2-7%, 5.3-7%, 5.4-7%, 5.5-7%, 5.6-7%, 5.7-7%, 5.8-7%, 5.9-7%, 6-7%, 6.1-7%, 6.2-7%, 6.3-7%, 6.4-7%, 6.5-7%, 6.6-7%, 6.7-7%, 6.8-7%, 6.9-7%, 0-7.5%, 0.1-7.5%, 0.2-7.5%, 0.3-7.5%, 0.4-7.5%, 0.5-7.5%. 0.6-7.5%, 0.7-7.5%, 0.8-7.5%, 0.9-7.5%, 1-7.5%, 1.1-7.5%, 1.2-7.5%, 1.3-7.5%, 1.4-7.5%, 1.5-7.5%, 1.6-7.5%, 1.7-7.5%, 1.8-7.5%, 1.9-7.5%, 2-7.5%, 2.1-7.5%, 2.2-7.5%, 2.3-7.5%, 2.4-7.5%, 2.5-7.5%, 2.6-7.5%, 2.7-7.5%, 2.8-7.5%, 2.9-7.5%, 3-7.5%, 3.1-7.5%, 3.2-7.5%, 3.3-7.5%, 3.4-7.5%, 3.5-7.5%, 3.6-7.5%, 3.7-7.5%, 3.8-7.5%, 3.9-7.5%, 4-7.5%, 4.1-7.5%, 4.2-7.5%, 4.3-7.5%, 4.4-7.5%, 4.5-7.5%, 4.6-7.5%, 4.7-7.5%, 4.8-7.5%, 4.9-7.5%, 5-7.5%, 5.1-7.5%, 5.2-7.5%, 5.3-7.5%, 5.4-7.5%, 5.5-7.5%, 5.6-7.5%, 5.7-7.5%, 5.8-7.5%, 5.9-7.5%, 6-7.5%, 6.1-7.5%, 6.2-7.5%, 6.3-7.5%, 6.4-7.5%, 6.5-7.5%, 6.6-7.5%, 6.7-7.5%, 6.8-7.5%, 6.9-7.5%, 7-7.5%, 7.1-7.5%, 7.2-7.5%, 7.3-7.5%, 7.4-7.5%, 0-8%, 0.1-8%, 0.2-8%, 0.3-8%, 0.4-8%, 0.5-8%, 0.6-8%, 0.7-8%, 0.8-8%, 0.9-8%, 1-8%, 1.1-8%, 1.2-8%, 1,3-8%, 1.4-8%, 1.5-8%, 1.6-8%, 1.7-8%, 1.8-8%, 1.9-8%, 2-8%, 2.1-8%, 2.2-8%, 2.3-8%, 2.4-8%, 2.5-8%, 2.6-8%, 2.7-8%, 2.8-8%, 2.9-8%, 3-8%, 3.1-8%, 3.2-8%, 3.3-8%, 3.4-8%, 3.5-8%, 3.6-8%, 3.7-8%, 3.8-8%, 3.9-8%, 4-8%, 4.1-8%, 4.2-8%, 4.3-8%, 4.4-8%, 4.5-8%, 4.6-8%, 4.7-8%, 4.8-8%, 4.9-8%, 5-8%, 5.1-8%, 5.2-8%, 5.3-8%, 5.4-8%, 5.5-8%, 5.6-8%, 5.7-8%, 5.8-8%, 5.9-8%, 6-8%, 6.1-8%, 6.2-8%, 6.3-8%, 6.4-8%, 6.5-8%, 6.6-8%, 6.7-8%, 6.8-8%, 6.9-8%, 7-8%, 7.1-8%, 7.2-8%, 7.3-8%, 7.4-8%, 7.5-8%, 7.6-8%, 7.7-8%, 7.8-8%, 7.9-8%, 0-8.5%, 0.1-8.5%, 0.3-8.5%, 0.4-8.5%, 0.5-8.5%, 0.6-8.5%, 0.7-8.5%, 0.8-8.5%, 0.9-8.5%, 1-8.5%, 1.1-8.5%, 1.2-8.5%, 1.3-8.5%, 1.4-8.5%, 1.5-8.5%, 1.6-8.5%, 1.7-8.5%, 1.8-8.5%, 1.9-8.5%, 2-8.5%, 2.1-8.5%, 2.2-8.5%, 2.3-8.5%.2.4-8.5%. 2.5-8.5%, 2.6-8.5%, 2.7-8.5%, 2.8-8.5%, 2.9-8.5%, 3-8.5%, 3.1-8.5%, 3.2-8.5%, 3.3-8.5%, 3.4-8.5%, 3.5-8.5%, 3.6-8.5%, 3.7-8.5%, 3.8-8.5%, 3.9-8.5%, 4-8.5%, 4.1-8.5%, 4.2-8.5%, 4.3-8.5%, 4.4-8.5%, 4.5-8.5%, 4.6-8.5%, 4.7-8.5%, 4.8-8.5%, 4.9-8.5%, 5-8.5%, 5.1-8.5%, 5.2-8.5%, 5.3-8.5%, 5.4-8.5%, 5.5-8.5%, 5.6-8.5%, 5.7-8.5%, 5.8-8.5%, 5.9-8.5%, 6-8.5%, 6.1-8.5%, 6.2-8.5%, 6.3-8.5%, 6.4-8.5%, 6.5-8.5%, 6.6-8.5%, 6.7-8.5%, 6.8-8.5%, 6.9-8.5%, 7-8.5%, 7.1-8.5%, 7.2-8.5%, 7.3-8.5%, 7.4-8.5%, 7.5-8.5%, 7.6-8.5%, 7.7-8.5%, 7.8-8.5%, 7.9-8.5%, 8-8.5%, 8.1-8.5%, 8.2-8.5%, 8.3-8.5%, 8.4-8.5%, 0-9%, 0.1-9%, 0.2-9%, 0.3-9%, 0.4-9%, 0.5-9%, 0.6-9%, 0.7-9%, 0.8-9%, 0.9-9%, 1-9%, 1.1-9%, 1.2-9%, 1.3-9%, 1.4-9%, 1.5-9%, 1.6-9%, 1.7-9%, 1.8-9%, 1.9-9%, 2-9%, 2.1-9%, 2.2-9%, 2.3-9%, 2.4-9%, 2.5-9%, 2.6-9%, 2.7-9%, 2.8-9%, 2.9-9%, 3-9%, 3.1-9%, 3.2-9%, 3.3-9%, 3.4-9%, 3.5-9%, 3.6-9%, 3.7-9%, 3.8-9%, 3.9-9%, 4-9%, 4.1-9%, 4.2-9%, 4.3-9%, 4.4-9%.4.5-9%, 4.6-9%, 4.7-9%, 4.8-9%, 4.9-9%, 5-9%, 5.1-9%, 5.2-9%, 5.3-9%, 5.4-9%, 5.5-9%, 5.6-9%, 5.7-9%, 5.8-9%, 5.9-9%, 6-9%, 6.1-9%, 6.2-9%, 6.3-9%, 6.4-9%, 6.5-9%, 6.6-9%, 6.7-9%, 6.8-9%, 6.9-9%, 7-9%, 7.1-9%, 7.2-9%, 7.3-9%, 7.4-9%, 7.5-9%, 7.6-9%, 7.7-9%, 7.8-9%, 7.9-9%, 8-9%, 8.1-9%, 8.2-9%, 8.3-9%, 8.4-9%, 8.5-9%, 8.6-9%, 8.7-9%, 8.8-9%, 8.9-9%, 0-9.5%, 0.1-9.5%, 0.2-9.5%, 0.3-9.5%, 0.4-9.5%, 0.5-9.5%, 0.6-9.5%, 0.7-9.5%, 0.8-9.5%, 0.9-9.5%, 1-9.5%, 1.1-9.5%, 1.2-9.5%, 1.3-9.5%, 1.4-9,5%, 1.5 -9.5%, 1.6-9.5%, 1.7-9.5%, 1.8-9.5%, 1.9-9.5%, 2-9.5%, 2.1-9.5%, 2.2-9.5%, 2.3-9.5%, 2.4-9.5%, 2.5-9.5%, 2.6-9.5%, 2.7-9.5%, 2.8-9.5%, 2.9-9.5%, 3-9.5%, 3.1-9.5%, 3.2-9.5%, 3.3-9.5%, 3.4-9.5%, 3.5-9.5%, 3.6-9.5%, 3.7-9.5%, 3.8-9.5%, 3.9-9.5%, 4-9.5%, 4.1-9.5%, 4.2-9.5%, 4.3-9.5%, 4.4-9.5%, 4.5-9.5%, 4.6-9.5%, 4.7-9.5%, 4,8-9,5%, 4,9-9,5%, 5-9.5%, 5.1-9.5%, 5.2-9.5%, 5.3-9.5%, 5.4-9.5%, 5.5-9.5%, 5.6-9.5%, 5.7-9.5%, 5.8-9.5%, 5.9-9.5%, 6-9.5%, 6.1-9.5%, 6.2-9.5%, 6.3-9.5%, 6.4-9.5%, 6.5-9.5%, 6.6-9.5%, 6.7-9.5%, 6.8-9.5%, 6.9-9.5%, 7-9.5%, 7.1-9.5%, 7.2-9.5%, 7.3-9.5%, 7.4-9.5%, 7.5-9.5%, 7.6-9.5%, 7.8-9.5%, 7.9-9.5%, 8-9.5%, 8.1-9.5%, 8.2-9.5%, 8.3-9.5%, 8.4-9.5%, 8,5-9.5%, 8.6-9.5%, 8.7-9.5%, 8.8-9.5%, 8.9-9.5%, 9-9.5%, 9.1-9.5%, 9.2-9.5%, 9.3-9.5%, 9.4-9.5%, 0-10%, 0.1-10%, 0.2-10%, 0.3-10%, 0.4-10%, 0.5-10%, 0.6-10%, 0.7-10%, 0.8-10%, 0.9-10%, 1-10%, 1.1-10%, 1.2-10%, 1.3-10%, 1.4-10%, 1.5-10%, 1.6-10%, 1.7-10%, 1.8-10%, 1.9-10%, 2-10%, 2.1-10%, 2.2-10%, 2.3-10%, 2.4-10%, 2.5-10%, 2.6-10%, 2.7-10%, 2.8-10%, 2.9-10%, 3-10%, 3.1-10%, 3.2-10%, 3.3-10%, 3.4-10%, 3.5-10%, 3.6-10%, 3.7-10%, 3.8-10%, 3.9-10%, 4-10%, 4.1-10%, 4.2-10%, 4.3-10%, 4.4-10%, 4.5-10%, 4.6-10%, 4.7-10%, 4.8-10%, 4.9-10%, 5-10%, 5.1-10%, 5.2-10%, 5.3-10%, 5.4-10%, 5.5-10%, 5.6-10%, 5.7-10%, 5.8-10%, 5.9-10%, 6-10%, 6.1-10%, 6.2-10%, 6.3-10%, 6.4-10%, 6.5-10%, 6.6-10%, 6.7-10%, 6.8-10%, 6.9-10%, 7-10%, 7.1-10%, 7.2-10%, 7.3-10%, 7.4-10%, 7.5-10%, 7.6-10%, 7.7-10%, 7.8-10%, 7.9-10%, 8-10%, 8.1-10%, 8.2-10%, 8.3-10%, 8.4-10%, 8.5-10%, 8.6-10%, 8.7-10%, 8.8-10%, 8.9-10%, 9-10%, 9.1-10%, 9.2-10%, 9.3-10%, 9.4-10%, 9.5-10%, 9.6-10%, 9.7-10%, 9.8-10%, or 9.9-10% w/v.

[0780] In certain embodiments, the formulation may comprise 0-10% w/v of trehalose.

[0781] In certain embodiments, the formulation may comprise 0-9% w/v of trehalose.

[0782] In certain embodiments, the formulation may comprise 0-8% w/v of trehalose.

[0783] In certain embodiments, the formulation may comprise 0-7% w/v of trehalose.

[0784] In certain embodiments, the formulation may comprise 0-6% w/v of trehalose.

[0785] In certain embodiments, the formulation may comprise 0-5% w/v of trehalose.

[0786] In certain embodiments, the formulation may comprise 0-4% w/v of trehalose.

[0787] In certain embodiments, the formulation may comprise 0-3% w/v of trehalose.

[0788] In certain embodiments, the formulation may comprise 0-2% w/v of trehalose.

[0789] In certain embodiments, the formulation may comprise 0-1% w/v of trehalose.

[0790] In certain embodiments, the formulation may comprise 1% w/v of trehalose.

[0791] In certain embodiments, the formulation may comprise 2% w/v of trehalose.

[0792] In certain embodiments, the formulation may comprise 3% w/v of trehalose.

[0793] In certain embodiments, the formulation may comprise 4% w/v of trehalose.

[0794] In certain embodiments, the formulation may comprise 5% w/v of trehalose.

[0795] In certain embodiments, the formulation may comprise 6% w/v of trehalose.

[0796] In certain embodiments, the formulation may comprise 7% wily of trehalose.

[0797] In certain embodiments, the formulation may comprise 8% w/v of trehalose.

[0798] In certain embodiments, the formulation may comprise 9% w/v of trehalose.

[0799] In certain embodiments, the formulation may comprise 10% w/v of trehalose.

### Sorhitol

[0800] In certain embodiments, the formulation may comprise at least one sugar substitute (e.g., a sugar alcohol) which is sorbitol.

[0801] In certain embodiments, the formulation may comprise sorbitol at 0.1%, 0.2%, 0.3%, 0.4%, 0.5%, 0.6%, 0.7%, 0.8%, 0.9%, 1%, 1.1%, 1.2%, 1.3%, 1.4%, 1.5%, 1.6%, 1.7%, 1.8%, 1.9%, 2%, 2.1%, 2.2%, 2.3%, 2.4%, 2.5%, 2.6%, 2.7%, 2.8%, 2.9%, 3%, 3.1%, 3.2%, 3.3%, 3.4%, 3.5%, 3.6%, 3.7%, 3.8%, 3.9%, 4%, 4.1%, 4.2%, 4.3%, 4.4%, 4.5%, 4.6%, 4.7%, 4.8%, 4.9%, 5%, 5.1%, 5.2%, 5.3%, 5.4%, 5.5%, 5.6%, 5.7%, 5.8%, 5.9%, 6%, 6.1%, 6.2%, 6.3%, 6.4%, 6.5%, 6.6%, 6.7%, 6.8%, 6.9%, 7%, 7.1%, 7.2%, 7.3%, 7.4%, 7.5%, 7.6%, 7.7%, 7.8%, 7.9%, 8%, 8.1%, 8.2%, 8.3%, 8.4%, 8.5%, 8.6%, 8.7%, 8.8%, 8.9%, 9%, 9.1%, 9.2%, 9.3%, 9.4%, 9.5%, 9.6%, 9.7%, 9.8%, 9.9%, or 10% w/v.

[0802] In certain embodiments, the formulation may comprise sorbitol in a range of 0-1%, 0.1-1%, 0.2-1%, 0.3-1%, 0.4-1%, 0.5-1%, 0.6-1%, 0.7-1%, 0.8-1%, 0.9-1%, 0-1.5%, 0.1-1.5%, 0.2-1.5%, 0.3-1.5%, 0.4-1.5%, 0.5-1.5%, 0.6-1.5%, 0.7-1.5%, 0.8-1.5%, 0.9-1.5%, 1-1.5%, 1.1-1.5%, 1.2-1.5%, 1.3-1.5%, 1.4-1.5%, 0-2%, 0.1-2%, 0.2-2%, 0.3-2%, 0.4-2%, 0.5-2%, 0.6-2%, 0.7-2%, 0.8-2%, 0.9-2%, 1-2%, 1,1-2%, 1.2-2%, 1.3-2%, 1.4-2%, 1.5-2%, 1.6-2%, 1.7-2%, 1.8-2%, 1.9-2%, 0-2.5%, 0.1-2.5%, 0.2-2.5%, 0.3-2.5%, 0.4-2.5%, 0.5-2.5%, 0.6-2.5%, 0.7-2.5%, 0.8-2.5%, 0.9-2.5%, 1-2.5%, 1.1-2.5%, 1.2-2.5%, 1.3-2.5%, 1.4-2.5%, 1.5-2.5%, 1.6-2.5%, 1.7-2.5%, 1.8-2.5%, 1.9-2.5%, 2-2.5%, 2.1-2.5%, 2.2-2.5%, 2.3-2.5%, 2.4-2.5%, 0-3%, 0.1-3%, 0.2-3%, 0.3-3%, 0.4-3%, 0.5-3%, 0.6-3%, 0.7-3%, 0.8-3%, 0.9-3%, 1-3%, 1.1-3%, 1.2-3%, 1.3-3%, 1.4-3%, 1.5-3%, 1.6-3%, 1.7-3%, 1.8-3%, 1.9-3%, 2-3%, 2.1-3%, 2.2-3%, 2.3-3%, 2.4-3%, 2.5-3%, 2.6-3%, 2.7-3%, 2.8-3%, 2.9-3%, 0-3.5%, 0.1-3.5%, 0.2-3.5%, 0.3-3.5%, 0.4-3.5%, 0.5-3.5%, 0.6-3.5%,0.7-3.5%, 0.8-3.5%, 0.9-3.5%, 1-3.5%, 1.1-3.5%, 1.2-3.5%, 1.3-3.5%, 1.4-3.5%, 1.5-3.5%, 1.6-3.5%, 1.7-3.5%, 1.8-3.5%, 1.9-3.5%, 2-3.5%, 2.1-3.5%, 2.2-3.5%, 2.3-3.5%, 2.4-3.5%, 2.5-3.5%, 2.6-3.5%, 2.7-3.5%, 2.8-3.5%, 2.9-3.5%, 3-3.5%, 3.1-3.5%, 3.2-3.5%, 3.3-3.5%, 3.4-3.5%, 0-4%, 0.1-4%, 0.2-4%, 0.3-4%, 0.4-4%, 0.5-4%, 0.6-4%, 0.7-4%, 0.8-4%, 0.9-4%, 1-4%, 1.1-4%, 1.2-4%, 1.3-4%, 1.4-4%, 1.5-4%, 1.6-4%, 1.7-4%, 1.8-4%, 1.9-4%, 2-4%, 2.1-4%, 2.2-4%, 2.3-4%, 2.4-4%, 2.5-4%, 2.6-4%, 2.7-4%, 2.8-4%, 2.9-4%, 3-4%, 3.1-4%, 3.2-4%, 3.3-4%, 3.4-4%, 3.5-4%, 3.6-4%, 3.7-4%, 3.8-4%, 3.9-4%, 0-4.5%, 0.1-4.5%, 0.2-4.5%, 0.3-4.5%, 0.4-4.5%, 0.5-4.5%, 0.6-4.5%, 0.7-4.5%, 0.8-4.5%, 0.9-4.5%, 1-4.5%, 1.1-4.5%, 1.2-4.5%, 1.3-4.5%, 1.4-4.5%, 1.5-4.5%, 1.6-4.5%, 1.7-4.5%, 1.8-4.5%, 1.9-4.5%, 2-4.5%, 2.1-4.5%, 2.2-4.5%, 2.3-4.5%, 2.4-4.5%, 2.5-4.5%, 2.6-4.5%, 2.7-4.5%, 2.8-4.5%, 2.9-4.5%, 3-4.5%, 3.1-4.5%, 3.2-4.5%, 3.3-4.5%, 3.4-4.5%, 3.5-4.5%, 3.6-4.5%, 3.7-4.5%, 3.8-4.5%, 3.9-4.5%, 4-4.5%, 4.1-4.5%, 4.2-4.5%, 4.3-4.5%, 4.4-4.5%, 0-5%, 0.1-5%, 0.2-5%, 0.3-5%, 0.4-5%, 0.5-5%, 0.6-5%, 0.7-5%, 0.8-5%, 0.9-5%, 1-5%, 1.1-5%, 1.2-5%, 1.3-5%, 1.4-5%, 1.5-5%, 1.6-5%, 1.7-5%, 1.8-5%, 1.9-5%, 2-5%, 2.1-5%, 2.2-5%, 2.3-5%, 2.4-5%, 2.5-5%, 2.6-5%, 2.7-5%, 2.8-5%, 2.9-5%, 3-5%, 3.1-5%, 3.2-5%, 3.3-5%, 3.4-5%, 3.5-5%, 3.6-5%, 3.7-5%, 3.8-5%, 3.9-5%, 4-5%, 4.1-5%, 4.2-5%, 4.3-5%, 4.4-5%, 4.5-5%, 4.6-5%, 4.7-5%, 4.8-5%, 4.9-5%, 0-5.5%, 0.1-5.5%, 0.2-5.5%, 0.3-5.5%, 0.4-5.5%, 0.5-5.5%, 0.6-5.5%, 0.7-5.5%, 0.8-5.5%, 0.9-5.5%, 1-5.5%, 1.1-5.5%, 1.2-5.5%, 1.3-5.5%, 1.4-5.5%, 1.5-5.5%, 1.6-5.5%, 1.7-5.5%, 1.8-5.5%, 1.9-5.5%, 2-5.5%, 2.1-5.5%, 2.2-5.5%, 2.3-5.5%, 2.4-5.5%, 2.5-5.5%, 2.6-5.5%, 2.7-5.5%, 2.8-5.5%, 2.9-5.5%, 3-5.5%, 3.1-5.5%, 3.2-5.5%, 3.3-5.5%, 3.4-5.5%, 3.5-5.5%, 3.6-5.5%, 3.7-5.5%, 3.8-5.5%, 3.9-5.5%, 4-5.5%, 4.1-5.5%, 4.2-5.5%, 4.3-5.5%, 4.4-5.5%, 4.5-5.5%, 4.6-5.5%, 4.7-5.5%, 4.8-5.5%, 4.9-5.5%, 5-5.5%, 5.1-5.5%, 5.2-5.5%, 5.3-5.5%, 5.4-5.5%, 0-6%, 0.1-6%, 0.2-6%, 0.3-6%, 0.4-6%, 0.5-6%, 0.6-6%, 0.7-6%, 0.8-6%, 0.9-6%, 1-6%, 1.1-6%, 1.2-6%, 1.3-6%, 1.4-6%, 1.5-6%, 1.6-6%, 1.7-6%, 1.8-6%, 1.9-6%, 2-6%, 2.1-6%, 2.2-6%, 2.3-6%, 2.4-6%, 2.5-6%, 2.6-6%, 2.7-6%, 2.8-6%, 2.9-6%, 3-6%, 3.1-6%, 3.2-6%, 3.3-6%, 3.4-6%, 3.5-6%, 3.6-6%, 3.7-6%, 3.8-6%, 3.9-6%, 4-6%, 4.1-6%, 4.2-6%, 4.3-6%, 4.4-6%, 4.5-6%, 4.6-6%, 4.7-6%, 4.8-6%, 4.9-6%, 5-6%, 5.1-6%, 5.2-6%, 5.3-6%, 5.4-6%, 5.5-6%, 5.6-6%, 5.7-6%, 5.8-6%, 5.9-6%, 0-6.5%, 0.1-6.5%, 0.2-6.5%, 0.3-6.5%, 0.4-6.5%, 0.5-6.5%, 0.6-6.5%, 0.7-6.5%, 0.8-6.5%, 0.9-6.5%, 1-6.5%, 1.1-6.5%, 1.2-6.5%, 1.3-6.5%, 1.4-6.5%, 1.5-6.5%, 1.6-6.5%, 1.7-6.5%, 1.8-6.5%, 19-6.5%, 2-6.5%, 2.1-6.5%, 2.2-6.5%, 2.3-6.5%, 2.4-6.5%, 2.5-6.5%, 2.6-6.5%, 2.7-6.5%, 2.8-6.5%, 2.9-6.5%, 3-6.5%, 3.1-6.5%, 3.2-6.5%, 3.3-6.5%, 3.4-6.5%, 3.5-6.5%, 3.6-6.5%, 3.7-6.5%, 3.8-6.5%, 3.9-6.5%, 4-6.5%, 4.1-6.5%, 4.2-6.5%, 4.3-6.5%, 4.4-6.5%, 4.5-6.5%, 4.6-6.5%, 4.7-6.5%, 4.8-6.5%, 4.9-6.5%, 5-6.5%, 5.1-6.5%, 5.2-6.5%, 5.3-6.5%, 5.4-6.5%, 5.5-6.5%, 5.6-6.5%, 5.7-6.5%, 5.8-6.5%, 5.9-6.5%, 6-6.5%, 6.1-6.5%, 6.2-6.5%, 6.3-6.5%, 6.4-6.5%, 0-7%, 0.1-7%, 0.2-7%, 0.3-7%, 0.4-7%, 0.5-7%, 0.6-7%, 0.7-7%, 0.8-7%, 0.9-7%, 1-7%, 1.1-7%, 1.2-7%, 1.3-7%, 1.4-7%, 1.5-7%, 1.6-7%, 1.7-7%, 1.8-7%, 1.9-7%, 2-7%, 2.1-7%, 2.2-7%, 2.3-7%, 2.4-7%, 2.5-7%, 2.6-7%, 2.7-7%, 2.8-7%, 2.9-7%, 3-7%, 3.1-7%, 3.2-7%, 3.3-7%, 3.4-7%, 3.5-7%, 3.6-7%, 3.7-7%, 3.8-7%, 3.9-7%, 4-7%, 4.1-7%, 4.2-7%, 4.3-7%, 4.4-7%, 4.5-7%, 4.6-7%, 4.7-7%, 4.8-7%, 4.9-7%, 5-7%, 5.1-7%, 5.2-7%, 5.3-7%, 5.4-7%, 5.5-7%, 5.6-7%, 5.7-7%, 5.8-7%, 5.9-7%, 6-7%, 6.1-7%, 6.2-7%, 6.3-7%, 6.4-7%, 6.5-7%, 6.6-7%, 6.7-7%, 6.8-7%, 6.9-7%, 0-7.5%, 0.1-7.5%, 0.2-7.5%, 0.3-7.5%, 0.4-7.5%, 0.5-7.5%, 0.6-7.5%, 0.7-7.5%, 0.8-7.5%, 0.9-7.5%, 1-7.5%, 1.1-7.5%, 1.2-7.5%, 1.3-7.5%, 1.4-7.5%, 1.5-7.5%, 1.6-7.5%, 1.7-7.5%, 1.8-7.5%, 1.9-7.5%, 2-7.5%, 2.1-7.5%, 2.2-7.5%, 2.3-7.5%, 2.4-7.5%, 2,5-7.5%, 2.6-7.5%, 2.7-7.5%, 2.8-7.5%, 2.9-7.5%, 3-7.5%, 3.1-7.5%, 3.2-7.5%, 3.3-7.5%, 3.4-7.5%, 3.5-7.5%, 3.6-7.5%, 3.7-7.5%, 3.8-7.5%, 3.9-7.5%, 4-7.5%, 4.1-7.5%, 4.2-7.5%, 4.3-7.5%, 4.4-7.5%, 4.5-7.5%, 4.6-7.5%, 4.7-7.5%, 4.8-7.5%, 4.9-7.5%, 5-7.5%, 5.1-7.5%, 5.2-7.5%, 5.3-7.5%, 5.4-7.5%, 5.5-7.5%, 5.6-7.5%, 5.7-7.5%, 5.8-7.5%, 5.9-7.5%, 6-7.5%, 6.1-7.5%, 6.2-7.5%, 6.3-7.5%, 6.4-7.5%, 6.5-7.5%, 6.6-7.5%, 6.7-7.5%, 6.8-7.5%, 6.9-7.5%, 7-7.5%, 7.1-7.5%, 7.2-7.5%, 7.3-7.5%, 7.4-7.5%, 0-8%, 0.1-8%, 0.2-8%, 0.3-8%, 0.4-8%, 0.5-8%, 0.6-8%, 0.7-8%, 0.8-8%, 0.9-8%, 1-8%, 1.1-8%, 1.2-8%, 1,3-8%, 1.4-8%, 1.5-8%, 1.6-8%, 1.7-8%, 1.8-8%, 1.9-8%, 2-8%, 2.1-8%, 2.2-8%, 2.3-8%, 2.4-8%, 2.5-8%, 2.6-8%, 2.7-8%, 2.8-8%, 2.9-8%, 3-8%, 3.1-8%, 3.2-8%, 3.3-8%, 3.4-8%, 3.5-8%, 3.6-8%, 3.7-8%, 3.8-8%, 3.9-8%, 4-8%, 4.1-8%, 4.2-8%, 4.3-8%, 4.4-8%, 4,5-8%, 4.6-8%, 4.7-8%, 4.8-8%, 4.9-8%, 5-8%, 5.1-8%, 5.2-8%, 5.3-8%, 5.4-8%, 5.5-8%, 5.6-8%, 5.7-8%, 5.8-8%, 5.9-8%, 6-8%, 6.1-8%, 6.2-8%, 6.3-8%, 6.4-8%, 6.5-8%, 6.6-8%, 6.7-8%, 6.8-8%, 6.9-8%, 7-8%, 7.1-8%, 7.2-8%, 7.3-8%, 7.4-8%, 7.5-8%, 7.6-8%, 7.7-8%, 7.8-8%, 7.9-8%, 0-8.5%, 0.1-8.5%, 0.3-8.5%, 0.4-8.5%, 0.5-8.5%, 0.6-8.5%, 0.7-8.5%, 0.8-8.5%, 0.9-8.5%, 1-8.5%, 1.1-8.5%, 1.2-8.5%, 1.3-8.5%, 1.4-8.5%, 1.5-8.5%, 1.6-8.5%, 1.7-8.5%, 1.8-8.5%, 1.9-8.5%, 2-8.5%, 2.1-8.5%, 2.2-8.5%, 2.3-8.5%.2.4-8.5%. 2.5-8.5%, 2.6-8.5%, 2.7-8.5%, 2.8-8.5%, 2.9-8.5%, 3-8.5%, 3.1-8.5%, 3.2-8.5%, 3.3-8.5%, 3.4-8.5%, 3.5-8.5%, 3.6-8.5%, 3.7-8.5%, 3.8-8.5%, 3.9-8.5%, 4-8.5%, 4.1-8.5%, 4.2-8.5%, 4.3-8.5%, 4.4-8.5%, 4.5-8.5%, 4.6-8.5%, 4.7-8.5%, 4.8-8.5%, 4.9-8.5%, 5-8.5%, 5.1-8.5%, 5.2-8.5%, 5.3-8.5%, 5.4-8.5%, 5.5-8.5%, 5.6-8.5%, 5.7-8.5%, 5.8-8.5%, 5.9-8.5%, 6-8.5%, 6.1-8.5%, 6.2-8.5%, 6.3-8.5%, 6.4-8.5%, 6.5-8.5%, 6.6-8.5%, 6.7-8.5%, 6.8-8.5%, 6.9-8.5%, 7-8.5%, 7.1-8.5%, 7.2-8.5%, 7.3-8.5%, 7.4-8.5%, 7.5-8.5%, 7.6-8.5%, 7.7-8.5%, 7.8-8.5%, 7.9-8.5%, 8-8.5%, 8.1-8.5%, 8.2-8.5%, 8.3-8.5%, 8.4-8.5%, 0-9%, 0.1-9%, 0.2-9%, 0.3-9%, 0.4-9%, 0.5-9%, 0.6-9%, 0.7-9%, 0.8-9%, 0.9-9%, 1-9%, 1.1-9%, 1.2-9%, 1.3-9%, 1.4-9%, 1.5-9%, 1.6-9%, 1.7-9%, 1.8-9%, 1.9-9%, 2-9%. 2.1-9%, 2.2-9%, 2.3-9%, 2.4-9%, 2.5-9%, 2.6-9%, 2.7-9%, 2.8-9%, 2.9-9%, 3-9%, 3.1-9%, 3.2-9%, 3.3-9%, 3.4-9%, 3.5-9%, 3.6-9%, 3.7-9%, 3.8-9%, 3.9-9%, 4-9%, 4.1-9%, 4.2-9%, 4.3-9%, 4.4-9%, 4.5-9%, 4.6-9%, 4.7-9%, 4.8-9%, 4.9-9%, 5-9%, 5.1-9%, 5.2-9%, 5.3-9%, 5.4-9%, 5.5-9%, 5.6-9%, 5.7-9%, 5.8-9%, 5.9-9%, 6-9%, 6.1-9%, 6.2-9%, 6.3-9%, 6.4-9%, 6.5-9%, 6.6-9%, 6.7-9%, 6.8-9%, 6.9-9%, 7-9%, 7.1-9%, 7.2-9%, 7.3-9%, 7.4-9%, 7.5-9%, 7.6-9%, 7.7-9%, 7.8-9%, 7.9-9%, 8-9%, 8.1-9%, 8.2-9%, 8.3-9%, 8.4-9%, 8.5-9%, 8.6-9%, 8.7-9%, 8.8-9%, 8.9-9%, 0-9.5%, 0.1-9.5%, 0.2-9.5%, 0.3-9.5%, 0.4-9.5%, 0.5-9.5%, 0.6-9.5%, 0.7-9.5%, 0.8-9.5%, 0.9-9.5%, 1-9.5%, 1.1-9.5%, 1.2-9.5%, 1.3-9.5%, 1.4-9.5%, 1.5-9.5%, 1.6-9.5%, 1.7-9.5%, 1.8-9.5%, 1.9-9.5%, 2-9.5%, 2.1-9.5%, 2.2-9.5%, 2.3-9.5%, 2.4-9.5%, 2.5-9.5%, 2.6-9.5%, 2.7-9.5%, 2.8-9.5%, 2.9-9.5%, 3-9.5%, 3.1-9.5%, 3.2-9.5%, 3.3-9.5%, 3.4-9.5%, 3.5-9.5%, 3.6-9.5%, 3.7-9.5%, 3.8-9.5%, 3.9-9.5%, 4-9.5%, 4.1-9.5%, 4.2-9.5%, 4.3-9.5%, 4.4-9.5%, 4.5-9.5%, 4.6-9.5%, 4.7-9.5%, 4.8-9.5%, 4.9-9.5%, 5-9.5%, 5.1-9.5%, 5.2-9.5%, 5.3-9.5%, 5.4-9.5%, 5.5-9.5%, 5.6-9.5%, 5.7-9.5%, 5.8-9.5%, 5.9-9.5%, 6-9.5%, 6.1-9.5%, 6.2-9.5%, 6.3-9.5%, 6.4-9.5%, 6.5-9.5%, 6.6-9.5%, 6.7-9.5%, 6.8-9.5%, 6.9-9.5%, 7-9.5%, 7.1-9.5%, 7.2-9.5%, 7.3-9.5%, 7.4-9.5%, 7.5-9.5%, 7.6-9.5%, 7.7-9.5%, 7.8-9.5%, 7.9-9.5%, 8-9.5%, 8.1-9.5%, 8.2-9.5%, 8.3-9.5%, 8.4-9.5%, 8.5-9.5%, 8.6-9.5%, 8.7-9.5%, 8.8-9.5%, 8.9-9.5%, 9-9.5%, 9.1-9.5%, 9.2-9.5%, 9.3-9.5%, 9.4-9.5%, 0-10%, 0.1-10%, 0.2-10%, 0.3-10%, 0.4-10%, 0.5-10%, 0.6-10%, 0.7-10%, 0.8-10%, 0.9-10%, 1-10%, 1.1-10%, 1.2-10%, 1.3-10%, 1.4-10%, 1.5-10%, 1.6-10%, 1.7-10%, 1.8-10%, 1.9-10%, 2-10%, 2.1-10%, 2.2-10%, 2.3-10%, 2.4-10%, 2.5-10%, 2.6-10%, 2.7-10%, 2.8-10%, 2.9-10%, 3-10%, 3.1-10%, 3.2-10%, 3.3-10%, 3.4-10%, 3.5-10%, 3.6-10%, 3.7-10%, 3.8-10%, 3.9-10%, 4-10%, 4.1-10%, 4.2-10%, 4.3-10%, 4.4-10%, 4.5-10%, 4.6-10%, 4.7-10%, 4.8-10%, 4.9-10%, 5-10%, 5.1-10%, 5.2-10%, 5.3-10%, 5.4-10%, 5.5-10%, 5.6-10%, 5.7-10%, 5.8-10%, 5.9-10%, 6-10%, 6.1-10%, 6.2-10%, 6.3-10%, 6.4-10%, 6.5-10%, 6.6-10%, 6.7-10%, 6.8-10%, 6.9-10%, 7-10%, 7.1-10%, 7.2-10%, 7.3-10%, 7.4-10%, 7.5-10%, 7.6-10%, 7.7-10%, 7.8-10%, 7.9-10%, 8-10%, 8.1-10%, 8.2-10%, 8.3-10%, 8.4-10%, 8.5-10%, 8.6-10%, 8.7-10%, 8.8-10%, 8.9-10%, 9-10%, 9.1-10%, 9.2-I0%, 9.3-10%, 9.4-10%, 9.5-10%, 9.6-10%, 9.7-10%, 9.8-10%, or 9.9-10% w/v.

[0803] In certain embodiments, the formulation may comprise 0-10% w/v of sorbitol.

[0804] In certain embodiments, the formulation may comprise 0-9% w/v of sorbitol.

[0805] In certain embodiments, the formulation may comprise 0-8% w/v of sorbitol.

[0806] In certain embodiments, the formulation may comprise 0-7% w/v of sorbitol.

[0807] In certain embodiments, the formulation may comprise 0-6% w/v of sorbitol.

[0808] In certain embodiments, the formulation may comprise 0-5% w/v of sorbitol.

[0809] In certain embodiments, the formulation may comprise 0-4% w/v of sorbitol.

[0810] In certain embodiments, the formulation may comprise 0-3% w/v of sorbitol.

[0811] In certain embodiments, the formulation may comprise 0-2% w/v of sorbitol.

[0812] In certain embodiments, the formulation may comprise 0-1% w/v of sorbitol.

[0813] In certain embodiments, the formulation may comprise 1% w/v of sorbitol.

[0814] In certain embodiments, the formulation may comprise 2% w/v of sorbitol.

[0815] In certain embodiments, the formulation may comprise 3% w/v of sorbitol,

[0816] In certain embodiments, the formulation may comprise 4% w/v of sorbitol.

[0817] In certain embodiments, the formulation may comprise 5% w/v of sorbitol.

[0818] In certain embodiments, the formulation may comprise 6% w/v of sorbitol.

[0819] In certain embodiments, the formulation may comprise 7% w/v of sorbitol.

[0820] In certain embodiments, the formulation may comprise 8% w/v of sorbitol.

[0821] In certain embodiments, the formulation may comprise 9% w/v of sorbitol.

[0822] In certain embodiments, the formulation may comprise 10% w/v of sorbitol.

### Surfactant

[0823] In certain embodiments, formulations of pharmaceutical compositions described herein may comprise a surfactant. Surfactants may help control shear threes in suspension cultures. Surfactants used herein may be anionic, zwitterionic, or non-ionic surfactants and may comprise those known in the art that are suitable for use in pharmaceutical formulations.

[0824] Examples of anionic surfactants comprise, but are not limited to. sulfate, sulthnate, phosphate esters, and carboxylates.

[0825] Examples of nonionic surfactants comprise, but are not limited to, ethoxylates, fatty alcohol ethoxylates, alkylphenol ethoxylates (e.g., nonoxynols, Triton X-100), fatty acid ethoxylates, ethoxylated amines and/or fatty acid amides (e.g., polyethoxylated tallow amine, cocamide monoethanolamine, cocamide diethanolamine), ethylene oxide/propylene oxide copolymer (e.g., Poloxamers such as Pluronic® F-68 or F-127), esters of fatty acids and polyhydric alcohols, fatty acid alkanolamides, ethoxylated aliphatic acids, ethoxylated aliphatic alcohols, ethoxylated sorbitol fatty acid esters, ethoxylated glycerides, ethoxylated block copolymers with EDTA (ethylene diaminetetraacetie acid), ethoxylated cyclic ether adducts, ethoxylated amide and imidazoline adducts, ethoxylated amine adducts, ethoxylated mercaptan adducts, ethoxylated condensates with alkyl phenols, ethoxylated nitrogen-based hydrophobes, ethoxylated polyoxypropylenes, polymeric silicones, fluorinated surfactants, and polymerizable surfactants.

[0826] Examples of zwitterionic surfactants comprise, but are not limited to, alkylamido betaines and amine oxides thereof, alkyl betaines and amine oxides thereof, sulfo betaines, hydroxy sulfo betaines, amphoglycinates, amphopropionates, balanced amphopoly-carboxyglycinates, and alkyl polyaminoglycinates. Proteins have the ability of being charged or uncharged depending on the pH; thus, at the right pH, a protein, preferably with a pI of about 8 to 9, such as modified Bovine Serum Albumin or chymotrypsinogen, could function as a zwitterionic surfactant. Various mixtures of surfactants can be used if desired,

### Copolymers

[0827] In certain embodiments, at least one of the components in the formulation is copolymer.

[0828] In certain embodiments, the formulation may comprise at least one copolymer at a concentration of 0.00001%, 0.0001%, 0.001%, 0.01%, 0.1%, or 1% w/v.

[0829] In certain embodiments, the formulation may comprise at least one copolymer in a range of 0,00001%-0.0001%, 0.00001%-0.001%, 0.00001%4).01%, 0.00001%-0.1%, 0.00001%-1%, 0.0001%-0.001%, 0.0001%-0.01%, 0.0001%-0.1%; 0.0001%-1%; 0.001%-0.01%, 0.001%41%, 0.001%-1%, 0.01%-0.1%, 0.01%-1%, or 0.1-1% w/v.

[0830] In certain embodiments, the formulation may comprise 0.001% w/v copolymer.

[0831] In certain embodiments, the copolymer is an ethylene oxide/propylene oxide copolymer.

[0832] In certain embodiments, the formulation may comprise at least one ethylene oxide/propylene oxide copolymer at a concentration of 0.00001%, 0.0001%, 0.001%, 0.01%, 0.1%; or 1% w/v.

[0833] In certain embodiments, the formulation may comprise at least one ethylene oxide/propylene oxide copolymer in a range of 0,00001%-0.0001%, 0.00001%-0.001%, 0.00001%-0.01%, 0.00001%-0.1%, 0.00001%-1%, 0.0001%-0.001%, 0.0001%-0.01%, 0.0001%-0.1%, 0.0001%-1%, 0.001%-0.01%. 0.001%-0.1%, 0.001%-1%, 0.01%-0.1%, 0.01%4%, or 0.1-1% w/v.

[0834] In certain embodiments, the formulation may comprise 0.001% w/v ethylene oxide/propylene oxide copolymer.

[0835] In certain embodiments, the formulation may comprise at least one ethylene oxide/propylene copolymer which is a Poloxamer. In certain embodiments, the formulation may comprise Poloxamer at a concentration of 0.00001%. 0.0001%, 0.001%, 0.01%, 0.1%, or 1% w/v.

[0836] In certain embodiments, the formulation may comprise Poloxamer in a range of 0.00001%-0.0001%, 0.00001%-0.001%, 0.00001%-0.01%, 0.00001%-0.1%, 0.00001%-1%, 0.0001%-0.001%, 0.0001%-0.01%, 0.0001%-0.1%, 0.0001%-1%, 0.001%-0.01%, 0.001%-0.1%, 0.001%-1%, 0.01%-0.1%, 0.01%-1%, or 0.1-1% w/v.

[0837] In certain embodiments, the formulation may comprise 0.001% w/v Poloxamer.

[0838] In certain embodiments, the formulation may comprise at least one ethylene oxide/propylene copolymer which is Poloxamer 188. In certain embodiments, the formulation may comprise Poloxamer 188 at a concentration of 0.00001%, 0.0001%, 0.001%, 0.01%, 0.1%, or 1% w/v.

[0839] In certain embodiments, the formulation may comprise Poloxamer 188 in a range of 0.00001%-0.0001%, 0.00001%-0.001%, 0.00001%-0.01%, 0.00001%-0.1%, 0.00001%-1%, 0.0001%-0.001%, 0.0001%-0.01%, 0.0001%-0.1%, 0.0001%-1%, 0.001%-0.01%, 0.001%-0.1%, 0.001%-1%, 0.01%-0.1%, 0.01%-1%, or 0.1-1% w/v.

[0840] In certain embodiments, the formulation may comprise 0.001%-0.1 w/v Poloxamer 188.

[0841] In certain embodiments, the formulation may comprise at least one ethylene oxide/propylene, copolymer which is Pluronic F-68. In certain embodiments, the formulation may comprise Pluronic® F-68 at a concentration of 0.00001%, 0.0001%, 0.001%, 0.01%, 0.1%, or 1% w/v.

[0842] In certain embodiments, the formulation may comprise Pluronic® F-68 in a range of 0.00001%-0.0001%, 0.00001%-0.001%, 0.00001%-0.01%, 0.00001%-0.1%, 0.00001%-1%, 0.0001%-0.001%, 0.0001%-0.01%, 0.0001%-0.1%, 0.0001%-1%, 0.001%-0.01%, 0.001%-0.1%, 0.001%-1%, 0.01%-0.1%, 0.01%-1%, or 0.1-1% w/v.

[0843] In certain embodiments, the formulation may comprise 0,001%-0.1% w/v Pluronic® F-68. In certain embodiments, the formulation may comprise 0.001% w/v Pluronic® F-68.

### Formulation Properties

[0844] In certain embodiments, the formulation has been optimized to have a specific pH, osmolality, concentration, concentration of AAV particle, and/or total dose of AAV particle.

pH

[0845] In certain embodiments, the formulation may be optimized for a specific pH. In certain embodiments, the formulation may comprise a pH buffering agent (also referred to herein as “buffering agent”) which is a weak acid or base that, when used in the formulation, maintains the pH of the formulation near a chosen value even after another acid or base is added to the formulation. The pH of the formulation may be, but is not limited, to 0. 0.1, 0.2, 0.3. 0.4. 0.5. 0.6. 0.7. 0.8. 0.9, 1, 1.1, 1.2, 1.3, 1.4, 1.5, 1.6, 1.7, 1.8, 1.9, 2, 2.1, 2.2, 2.3, 2.4, 2.5, 2.6, 2.7, 2.8, 2.9, 3, 3.1, 3.2, 3.3, 3.4, 3.5, 3.6, 3.7, 3.8, 3.9, 4, 4.1, 4.2, 4.3, 4.4, 4.5, 4.6, 4.7, 4.8, 4.9, 5, 5.1, 5.2, 5.3, 5.4, 5.5, 5.6, 5.7, 5.8, 5.9, 6, 6.1, 6.2, 6.3, 6.4, 6.5, 6.6, 6.7, 6.8, 6.9, 7, 7.1, 7.2, 7.3, 7.4, 7.5, 7.6, 7.7, 7.8, 7.9, 8, 8.1, 8.2, 8.3, 8.4, 8.5, 8.6, 8.7, 8.8, 8.9, 9, 9.1, 9.2, 9.3, 9.4, 9.5, 9.6, 9.7, 9.8, 9.9, 10, 10.1, 10.2, 10.3, 10.4, 10.5, 10.6, 10.7, 10.8, 10.9, 11, 11.1, 11.2, 11.3, 11.4, 11.5, 11,6, 11,7, 11.8, 11.9, 12, 12,1, 12,2, 12 12.4, 12.5, 12.6, 12.7, 12.8, 12.9, 13, 13.1, 13.2, 13.3, 13.4, 13.5, 13.6, 13.7, 13.8, 13.9, and 14.

[0846] In certain embodiments, the formulation may be optimized for a specific pH range. The pH range may he, but is not limited to, 0-4, 1-5, 2-6, 3-7, 4-8, 5-9, 6-10, 7-11, 8-12, 9-13, 10-14, 0-1.5, 1-2.5, 2-3.5, 3-4.5, 4-5.5, 5-6.5, 6-7.5, 7-8.5, 8-9.5, 9-10.5, 10-11.5, 11-12.5, 12-13.5, 0-1, 1-2, 2-3, 3-4, 4-5, 5-6, 6-7, 7-8, 8-9, 9-10, 10-11, 11-12, 12-13, 13-14, 0-0.5, 0.5-1, 1-1.5, 1.5-2, 2-2.5, 2.5-3, 3-3.5, 3.5-4, 4-4.5, 4.5-5, 5-5.5, 5.5-6, 6-6.5, 6.5-7, 7-7.5, 7.2-8.2, 7.2-7.6, 7.3-7.7, 7.5-8, 7.8-8.2, 8-8.5, 8.5-9, 9-9.5, 9.5-10, 10-10.5, 10.5-11, 11-11.5, 11.5-12, 12-12.5, 12.5-13, 13-13.5, or 13.5-14.

[0847] In certain embodiments, the pH of the formulation is between 6 and 8.5.

[0848] In certain embodiments, the pH of the formulation is between 7 and 8.5

[0849] In certain embodiments, the pH of the formulation is between 7 and 7.6.

[0850] In certain embodiments, the pH of the formulation is 7.

[0851] In certain embodiments, the pH of the formulation is 7.1.

[0852] In certain embodiments, the pH of the formulation is 7.2.

[0853] In certain embodiments, the pH of the formulation is 7.3.

[0854] In certain embodiments, the pH of the formulation is 7.4.

[0855] In certain embodiments, the pH of the formulation is 7.5.

[0856] In certain embodiments, the pH of the formulation is 7.6.

[0857] In certain embodiments, the pH of the formulation is 7.7.

[0858] In certain embodiments, the pH of the formulation is 7.8.

[0859] In certain embodiments, the pH of the formulation is 7.9.

[0860] In certain embodiments, the pH of the formulation is 8.

[0861] In certain embodiments, the pH of the formulation is 8.1.

[0862] In certain embodiments, the pH of the formulation is 8.2.

[0863] In certain embodiments, the pH of the formulation is 8.3.

[0864] In certain embodiments, the pH of the formulation is 8.4.

[0865] In certain embodiments, the pH of the formulation is 8.5.

[0866] In certain embodiments, the pH is determined when the formulation is at 5° C.

[0867] In certain embodiments, the pH is determined when the formulation is at 25° C.

[0868] Suitable buffering agents may comprise, but not limited to, Tris HCl, Tris base, sodium phosphate (monosodium phosphate and/or disodium phosphate), potassium phosphate (monopotassium phosphate and/or dipotassimn phosphate), histidine, boric acid, citric acid, glycine, HEPES (4-(2-hydroxyethyl)-1-piperazineethanesulfonic acid), and MOPS (3(N-morpholino)propariesulfonic acid).

[0869] Concentration of buffering agents in the formulation may be between 1-50 mM, between 1-25 mM, between 5-30 mM, between 5-20 mM, between 5-15 mM, between 10-40 mM, or between 15-30 mM. Concentration of buffering agents in the formulation may be about 1 mM, 5 mM, 7.5 mM, 10 mM, 12.5 mM, 15 mM, 20 mM, 25 mM, 30 mM, 35 mM, 40 mM, or 50 mM.

[0870] In certain embodiments, the formulation may comprise, but is not limited to, phosphate-buffered saline (PBS). As a non-limiting example, the PBS may comprise sodium chloride, potassium chloride, disodium phosphate, monopotassium phosphate, and distilled water. in some instances, the PBS does not contain potassium or magnesium. In other instances, the PBS contains calcium and magnesium.

[0871] In certain embodiments, buffering agents used in the formulations of pharmaceutical compositions described herein may comprise sodium phosphate (monosodium phosphate and/or disodium phosphate). As a non-limiting example, sodium phosphate may be adjusted to a pH (at 5° C.) within the range of 7.4±0.2. In certain embodiments, buffering agents used in the formulations of pharmaceutical compositions described herein may comprise Tris base. Tris base may be adjusted with hydrochloric acid to any pH within the range of 7.1 and 9.1. As a non-limiting example, Tris base used in the formulations described herein may be adjusted to 8.0±0.2. As a non-limiting example, Tris base used in the formulations described herein may be adjusted to 7.5±0.2.

### Osmolality

[0872] In certain embodiments, the formulation may be optimized for a specific osmolality. The osmolality of the formulation may be, but is not limited to, 350, 351, 352, 353, 354, 355, 356, 357, 358, 359, 360, 361, 362, 363, 364, 365, 366, 367, 368, 369, 370, 371, 372, 373, 374, 375, 376, 377, 378, 379, 380, 381, 382, 383, 384, 385, 386, 387, 388, 389, 390, 391, 392, 393, 394, 395, 396, 397, 398, 399, 400, 401, 402, 403, 404, 405, 406, 407, 408, 409, 410, 411, 412, 413, 414, 415, 416, 417, 418, 419, 420, 421, 422, 423, 424, 425, 426, 427, 428, 429, 430, 431, 432, 433, 434, 435, 436, 437, 438, 439, 440, 441, 442, 443, 444, 445, 446, 447, 448, 449, 450, 451, 452, 453, 454, 455, 456, 457, 458, 459, 460, 461, 462, 463, 464, 465, 466, 467, 468, 469, 470, 471, 472, 473, 474, 475, 476, 477, 478, 479, 480, 481, 482, 483, 484, 485, 486, 487, 488, 489, 490, 491, 492, 493, 494, 495, 496, 497, 498, 499, or 500 mOsm/kg (milliosmoles/kg).

[0873] In certain embodiments, the formulation may be optimized for a specific range of osmolality. The range may be, but is not limited to, 350-360, 360-370, 370-380, 380-390, 390-400, 400-410, 410-420, 420-430, 430-440, 440-450, 450-460, 460-470, 470-480, 480-490, 490-500, 350-370, 360-380, 370-390, 380-400, 390-410, 400-420, 410-430, 420-440, 430-450, 440-460, 450-470, 460-480, 470-490, 480-500, 350-375, 375-400, 400-425, 425-450, 450-475, 475-500, 350-380, 360-390, 370-400, 380-410, 390-420, 400-430, 410-440, 420-450, 430-460, 440-470, 450-480, 460-490, 470-500, 350-390, 360-400, 370-410, 380-420, 390-430, 400-440, 410-450, 420-460, 430-470, 440-480, 450-490, 460-500, 350-400, 360-410, 370-420, 380-430, 390-440, 400-450, 410-460, 420-470, 430-480, 440-490, 450-500, 350-410, 360-420, 370-430, 380-440, 390-450, 400-460, 410-470, 420-480, 430-490, 440-500, 350-420, 360-430, 370-440, 380-450, 390-460, 400-470, 410-480, 420-490, 430-500, 350-430, 360-440, 370-450, 380-460, 390-470, 400-480, 410-490, 420-500, 350-440, 360-450, 370-460, 380-470, 390-480, 400-490, 410-500, 350-450, 360-460, 370-470, 380-480, 390-490, 400-500, 350-460, 360-470, 370-480, 380-490, 390-500, 350-470, 360-480, 370-490, 380-500, 350-480, 360-490, 370-500, 350-490, 360-500, or 350-500 mOs/kg.

[0874] In certain embodiments, the osmolality of the formulation is between 350-500 mOsm/kg.

[0875] In certain embodiments, the osmolality of the formulation is between 400-500 mOsm/kg.

[0876] In certain embodiments, the osmolality of the formulation is between 400-480 mOsm/kg.

[0877] In certain embodiments, the osmolality is 395 mOsm/kg.

[0878] In certain embodiments, the osmolality is 413 mOsm/kg.

[0879] In certain embodiments, the osmolality is 420 mOsm/kg.

[0880] In certain embodiments, the osmolality is 432 mOsm/kg.

[0881] In certain embodiments, the osmolality is 447 mOsm/kg,

[0882] In certain embodiments, the osmolality is 450 mOsm/kg.

[0883] In certain embodiments, the osmolality is 452 mOsm/kg.

[0884] In certain embodiments, the osmolality is 459 mOsm/kg.

[0885] In certain embodiments, the osmolality is 472 mOsm/kg.

[0886] In certain embodiments, the osmolality is 490 mOsm/kg.

[0887] In certain embodiments, the osmolality is 496 mOsm/kg.

### Concentration of AAV Particle

[0888] In certain embodiments, the concentration of AAV particle in the formulation may be between about 1×10⁶ VG/mi and about 1×10¹⁶ VG/ml. As used herein, “VG/ml” represents vector genomes (VG) per milliliter (ml). VG/ml also may describe genome copy per milliliter or DNase resistant particle per milliliter.

[0889] In certain embodiments, the formulation may comprise an AAV particle concentration of about 1×10⁶, 2×10⁶, 3×10⁶, 4×10⁶, 5×10⁶, 6×10⁶, 7×10⁶, 8×10⁶, 9×10⁶, 1×10⁷, 2×10⁷, 3×10⁷, 4×10⁷, 5×10⁷, 6×10⁷, 7×10⁷, 8×10⁷, 9×10⁷, 1×10⁸, 2×10⁸, 3×10⁸, 4×10⁸, 5×10⁸, 6×10⁸, 7×10⁸, 8×10⁸, 9×10⁸, 1×10⁹, 2×10⁹, 3×10⁹, 4×10⁹, 5×10⁹, 6×10⁹, 7×10⁹, 8×10⁹, 9×10⁹, 1×10¹⁰, 2×10¹⁰, 3×10¹⁰, 4×10¹⁰, 5×10¹⁰, 6×10¹⁰, 7×10¹⁰, 8×10¹⁰, 9×10¹⁰, 1×10¹¹, 2×10¹¹, 2.1×10¹¹, 2.2×10¹¹, 2.3×10¹¹, 2,4×10¹¹, 2.5×10¹¹, 2.6×10¹¹, 2.7×10¹¹, 2.9×10¹¹, 3×10¹¹, 4×10¹¹, 5×10¹¹, 6×10¹¹, 7×10¹¹, 7.1×10¹¹, 7.2×10¹¹, 7.3×10¹¹, 7.4×10¹¹, 7.5×10¹¹, 7.6×10¹¹, 7.7×10¹¹, 7.8×10¹¹, 7.9×10¹¹, 8×10¹¹, 9×10¹¹, 1×10¹², 1.1×10¹², 1.2×10¹², 1.3×10¹², 1.4×10¹², 1.5×10¹¹, 1.6×10¹², 1.7×10¹², 1.8×10¹², 1.9×10¹², 2×10¹², 2.1×10¹², 2.2×10¹², 2.3×10¹², 2.4×1.0¹², 2.5×10¹², 2.6×10¹², 2.7×10¹², 2.8×10¹², 2.9×10¹², 3×1.0¹¹, 4×10¹², 4.1×10¹², 4.2×10¹², 4.3×10¹², 4.4×10¹², 4.5×10¹², 4.6×10¹², 4.7×10¹¹, 4.8×10¹², 4.9×10¹², 5×10¹², 6×1.0¹², 7×10¹², 7.1×10¹², 7.2×10¹², 7.3×10¹², 7.4×10¹², 7.5×10¹¹, 7.6×10¹², 7.7×10¹², 7.8×10¹², 7.9×10¹², 8×10¹², 8.1×10¹², 8.2×10¹², 8.3×10¹², 8.4×10¹², 8.5×10¹², 8.6×10¹², 8.7×10¹², 8.8×10¹², 8.9×10¹², 9×10¹², 1×10^{—}, 1.1×10¹³, 1.2×10¹³, 1.3×10¹³, 1.4×10¹³, 1.5×10¹³, 1.6×10¹³, 1.7×10¹³, 1.8×10¹³ , 1.9×10¹³, 2×10¹³, 2.1×10¹³, 2.2×10¹³, 2.3×10¹³, 2.4×10¹³ , 2.5×10¹³, 2.6×10¹³, 2.7×10¹³, 2.8×10¹³, 2.9×10¹³, 3×10¹³, 3.1×10¹³, 3.2×10¹³, 3.3×10¹³, 3.4×10¹³, 3.5×10¹³, 3.6×10¹³, 3.7×10¹³, 3.8×10¹³, 3.9×10¹³, 4×10¹³, 5×10¹³, 6×10¹³, 6.7×10¹³, 7×10¹³, 8×10¹³, 9×10¹³, 1×10¹⁴, 2×10¹⁴, 3×10¹⁴, 4×10¹⁴, 5×10¹⁴, 6×10¹⁴, 7×10¹⁴, 8×10¹⁴, 9×10¹⁴, 1×10¹⁵, 2×10¹⁵, 3×10¹⁵, 4×10¹⁵, 5×10¹⁵, 6×10¹⁵, 7×10¹⁵, 8×10¹⁵, 9×10¹⁵, or 1×10¹⁶ VG/ml.

[0890] In certain embodiments, the concentration of AAV particle in the formulation is between 1×10¹¹ and 5×10¹³, between 1×10¹² and 5×10¹², between 2×10¹² and 1×10¹³, between 5×10¹² and 1×10¹³, between 1×10¹³ and 2×10¹³, between 2 ×10¹³ and 3 ×10¹³, between 2×10¹³ and 2.5×10¹³, between 2.5×10¹³ and 3×10¹³, or no more than 5×10¹³ VG/ml.

[0891] In certain embodiments, the concentration of AAV particle in the formulation s 2.7×10¹¹ VG/ml.

[0892] In certain embodiments, the concentration of AAV particle in the formulation is 9×10¹¹ VG/ml.

[0893] In certain embodiments, the concentration of AAV particle in the formulation is 1.22×10¹² VG/ml.

[0894] In certain embodiments, the concentration of AAV particle in the formulation is 2.7×10¹² VG/ml.

[0895] In certain embodiments, the concentration of AAV particle in the formulation is 4×10¹² VG/ml.

[0896] In certain embodiments, the concentration of AAV particle in the formulation is 6×10¹² VG/ml.

[0897] In certain embodiments, the concentration of AAV particle in the formulation is 7.9×10¹² VG/ml.

[0898] In certain embodiments, the concentration of AAV particle in the formulations 8×10¹² VG/ml.

[0899] In certain embodiments, the concentration of AAV particle in the formulation is 1×10¹³ VG/ml.

[0900] In certain embodiments, the concentration of AAV particle in the formulation is 1.8×10¹³ VG/ml.

[0901] In certain embodiments, the concentration of AAV particle in the formulation is 2.2×10¹³ VG/ml.

[0902] In certain embodiments, the concentration of AAV particle in the formulation is 2.7×10¹³ VG/ml.

[0903] In certain embodiments, the concentration of AAV particle in the formulation is 3.5×10¹³ VG/ml.

[0904] In certain embodiments, the concentration of AAV particle in the formulation is 2.7-3.5×10¹⁶ VG/ml.

[0905] In certain embodiments, the concentration of AAV particle in the formulation is 7.0×10¹³ VG/ml.

[0906] In certain embodiments, the concentration of. particle in the formulation is 5.0×10¹² VG/ml.

[0907] In certain embodiments, the concentration of AAV particle in the formulation may be between about 1×10⁶ total capsid/mL and about 1×10¹⁶ total capsid/ml, in certain embodiments, delivery may comprise a composition concentration of about 1×10⁶, 2×10⁶, 3×10⁶, 4×10⁶, 5×10⁶, 6×10⁶, 7×10⁶, 8×10⁶, 9×10⁶, 1×10⁷, 2×10⁷, 3×10⁷, 4×10⁷, 5×10⁷, 6×10⁷, 7×10⁷, 8×10⁷, 9×10⁷, 1×10⁸, 2×10⁸, 3×10⁸, 4×10⁸, 5×10⁸, 6×10⁸, 7×10⁸, 8×10⁸, 9×10⁸, 1×10⁹, 2×10⁹, 3×10⁹, 4×10⁹, 5×10⁹, 6×1.0⁹, 7×10⁹, 8×10⁹, 9×10⁹, 1×10¹⁰, 2×10¹⁰, 3×10¹⁰, 4×10¹⁰, 5×10¹⁰, 6×10¹⁰, 7×10¹⁰, 8×10¹⁰, 9×10¹⁰, 1×10¹¹, 2×10¹¹, 3×10¹¹, 4×10¹¹, 5×10¹¹, 6×10¹¹, 7×10¹¹, 8×10¹¹, 9×10¹¹, 1×10¹², 1.1×10¹², 1.2×10¹², 1.3×10¹², 1.4×10¹², 1.5×10¹², 1.6×10¹², 1.7×10¹², 1.8×10¹², 1.9×10¹², 2×10¹⁰, 2.1×10¹⁷, 2.2×10¹², 2.3×10¹², 2.4×10¹², 2.5×10¹², 2.6×10¹², 2.7×10¹², 2.8×10¹², 2.9×10¹², 3×10¹², 3.1×10¹², 3.23×10¹², 33×10¹², 3.4×10¹², 3.5×10¹², 3.6×10¹², 3.7×10¹², 3.8×10¹², 3.9×10¹², 4×10¹², 4.1×10¹², 4.2×10¹², 4.3×10¹², 4.4×10¹², 4.5×10¹², 4.6×10¹², 4.7×10¹², 4.8×10¹², 4.9×10¹², 5×10¹², 6×10¹², 7×10¹², 8×10¹², 9×10¹², 1×10¹³, 2×10¹³, 2.1×10¹³, 2.2×10¹³, 2.3×10¹³, 2.4×10¹³, 2.5×10¹³, 2.6×10¹³ , 2.7×10¹³, 7.8×10¹³, 2.9×10¹³, 3×10¹³, 4×10¹³, 5×10¹³, 6×10¹³, 6.7×10¹³, 7×10¹³, 8×10¹³, 9×10¹³, 1×10¹⁴, 2×10¹⁴, 3×10¹⁴, 4×10¹⁴, 5×10¹⁴, 6×10¹¹, 7×10¹⁴, 8×10¹⁴, 9×10¹⁴, 1×10¹⁵, 2×10¹⁵, 3×10¹⁵, 4×10¹⁵, 5×10¹⁵, 6×10¹⁵, 7×10¹⁵, 8×10¹⁵, 9×10¹⁵, or 1×10¹⁶ total capsid/ml.

### Total Dose of AAV Particle

[0908] In certain embodiments, the total dose of the AAV particle in the formulation may be between about 1×10⁶ VG and about 1×10¹⁶ VG. In certain embodiments, the formulation may comprise a total dose of AAV particle of about 1×10⁶, 2×10⁶, 3×10⁶, 4×10⁶, 5×10⁶, 6×10⁶, 7×10⁶, 8×10⁶, 9×10⁶, 1×10⁷, 2×10⁷, 3×10⁷, 4×10⁷, 5×10⁷, 6×10⁷, 7×10⁷, 8×10⁷, 9×10⁷, 1×10⁸, 2×10⁸, 3×10⁸, 4×10⁸, 5×10³, 6×10³, 7×10⁸, 8×10⁸, 9×10⁸, 1×10⁹, 2×10⁹, 3×10⁹, 4×10⁹, 5×10⁹, 6×10⁹, 7×10⁹, 8×10⁹, 9×10⁹, 10×10¹⁰, 2×10¹⁰, 3×10¹⁰, 4×10¹⁰, 5×10¹⁰, 6×10¹⁰, 7×10¹⁰, 8×10¹⁰, 9×10¹⁰, 1×10¹¹, 2×10¹¹, 2.1×10¹¹, 2,2×10¹¹, 2.3×10¹¹, 2.4×1.0¹¹, 2.5×10¹¹, 2.6×10¹¹, 2.7×10¹¹, 2.8×10¹¹, 2.9×10¹¹, 3×10¹¹, 4×10¹¹, 5×10¹¹, 6×10¹¹, 7×10¹¹, 7.1×10¹¹, 7.2×10¹¹, 7.3×10¹¹, 7.4×10¹¹, 7.5×10¹¹, 7.6×10¹¹, 7.7×10¹¹, 7.8×10¹¹, 7.9×10¹¹, 8×10¹¹, 9×10¹¹, 1×10¹², 1.1 ×10¹², 1.2×10¹², 1.3×10¹², 1.4×10¹², 1.5×10¹², 1.6×10¹², 1.7×10′², 1.8×10¹², 1.9×10¹², 2×10¹², 2.1×10¹², 2.2×10¹², 2.3×1.0¹², 2.4×10¹², 2.5×10¹², 2.6×10¹², 2.7×10¹³, 2.8×10¹², 2.9×10¹², 3×10¹², 4×10¹², 4.1×10¹², 4.2×10¹², 4.3×10¹², 4.4×10¹², 4.5×10¹², 4.6×10¹², 4.7×10¹², 4.8×10¹², 4.9×10¹², 5×10¹², 6×10¹², 7×10¹², 7.1×10¹², 7.2×10¹², 7.3×10¹², 7.4×10¹², 7.5×10¹², 7.6×10¹², 7.7×10¹², 7.8×10¹², 7.9×10¹², 8×10¹², 8.1×10¹², 8.2×10¹², 8.3×10¹², 8.4×10¹², 8.5×10¹², 8.6×10¹², 8,7×10¹², 8.8 ×10¹², 8.9×10¹², 9×10¹², 1×10′³, 1.1×1.0¹³, 1.2×10¹³, 1.3×10¹³, 1.4×1.0¹³, 1.5×10¹³, 1.6×10¹³, 1.7×10¹³, 1.8×10¹³, 1.9×10¹³, 2×10¹³, 2.1×10¹³, 2.2×10¹³, 2.3×10¹³, 2.4×10¹³, 2.5×10′³, 2.6×10¹³, 2.7×10¹³, 2.8×10¹³, 2.9×10¹³, 3×10¹³, 3.1×10¹³, 3.2×10¹³, 3.3×10¹³, 3.4×10¹³, 3.5×10¹³, 3.6×1.0¹³, 3,7×10¹³, 3.8×10¹³, 3.9×10¹³, 4×10¹³, 5×10¹³, 6×10¹³, 6.7×10¹³, 7×10¹³, 8×10¹³, 9×10¹³, 1×2×10¹⁴, 3×10¹⁴, 4×10¹⁴, 5×10¹⁴, 6×10¹⁴, 7×10¹⁴, 8×10¹⁴, 9×10¹⁴, 1×10¹⁵, 2×10¹⁵, 3×10¹⁵, 4×10¹⁵, 5×10′⁵, 6×10¹⁵, 7×10′⁵, 8×10¹⁵, 9×10¹⁵, or 1×10¹⁶ VG.

[0909] In certain embodiments, the total dose of., V particle in the formulation between 1×10¹¹ and 5×10¹³ VG.

[0910] In certain embodiments, the total dose of AAV particle in the formulation is between 1×10¹¹ and 2×10¹⁴ VG.

[0911] In certain embodiments, the total dose of AAV particle in the formulation is 1.4×10¹¹ VG.

[0912] In certain embodiments, the total dose of AAV particle in the formulation is 4.5×10¹¹ VG.

[0913] In certain embodiments, the total dose of AAV particle in the formulation is 6.8×10¹¹ VG.

[0914] In certain embodiments, the total dose of AA particle in the formulation is 1.4×10¹² VG.

[0915] In certain embodiments, the total dose of AAV particle in the formulation is 2.2×10¹² VG.

[0916] In certain embodiments, the total dose of AAV particle in the formulation is 4.6×10¹¹ VG.

[0917] In certain embodiments, the total dose of AAV particle in the formulation is 9.2×10¹² VG.

[0918] In certain embodiments, the total dose of AAV particle in the formulation is 1.0×10¹³ VG.

[0919] In certain embodiments, the total dose of AAV particle in the formulation is 2.3×10¹³ VG.

### Exemplary Formulations

[0920] Described below are exemplary, non-limiting formulations of the present disclosure. The formulations may comprise AAV-particle formulations. Table 7 presents a summary of the components and properties of certain exemplary formulations of the present disclosure. Each formulation may optionally comprise 0.001%-0.1% (w/v) of Poloxamer 188 (e.g. Pluronic F-68®).

TABLE 7
Exemplary Formulations

| | Sodium | Potassium | Sodium | Potassium | | | | |
|---|---|---|---|---|---|---|---|---|
| Formulation | phosphate | phosphate | chloride | chloride | Sugar | Other | | Osmolality |
| ID. | (mM) | (mM) | (mM) | (mM) | (w/v) | (mM) | pH | (mOsm/kg) |
| VYFORM1 | 10 | 1.5 | 95 | — | 7% | — | 7.4 | — |
| | | | | | (S) | | | |
| VYFORM2 | 2.7 | 1.5 | 155 | — | 5% | — | 7.2 | 450 |
| | | | | | (S) | | | |
| VYFORM3 | 2.7 | 1.5 | 107 | — | 7% | — | 6.9 | 428 |
| | | | | | (S) | | | |
| VYFORM4 | 2.7 | 1.5 | 92 | — | 7% | — | 6.9 | 402 |
| | | | | | (S) | | | |
| VYFORM5 | 2.7 | 1.5 | 98 | — | 9% | — | 6.9 | 428 |
| | | | | | (S) | | | |
| VYFORM6 | 2.7 | 1.5 | 83 | — | 9% | — | 6.9 | 402 |
| | | | | | (S) | | | |
| VYFORM7 | 2.7 | 1.5 | 150 | — | 7% | — | — | — |
| | | | | | (S) | | | |
| VYFORM8 | 2.7 | 1.5 | 150 | — | 9% | — | — | — |
| | | | | | (S) | | | |
| VYFORM9 | 10 | 2 | 192 | 2.7 | 1% | — | 7.4 | — |
| | | | | | (S) | | | |
| VYFORM10 | 10 | 2 | 150 | 2.7 | 3% | — | — | — |
| | | | | | (S) | | | |
| VYFORM11 | 10 | 2 | 125 | 2.7 | 5% | — | — | — |
| | | | | | (T) | | | |
| VYFORM12 | — | 2 | 125 | 2.7 | 5% | 10 (His) | — | — |
| VYFORM13 | — | — | 142 | 1.5 | 5% | 10 (Tris) | 7.4 | 424 |
| | | | | | (S) | | | |
| VYFORM14 | — | — | 127 | 1.5 | 5% | 10 (Tris) | 7.4 | 404 |
| | | | | | (S) | | | |
| VYFORM15 | — | — | 133 | 1.5 | 7% | 10 (Tris) | 7.4 | 432 |
| | | | | | (S) | | | |
| VYFORM16 | — | — | 118 | 1.5 | 7% | 10 (Tris) | 7.4 | 413 |
| | | | | | (S) | | | |
| VYFORM17 | — | — | 127 | 1.5 | 9% | 10 (Tris) | 7.4 | 436 |
| | | | | | (S) | | | |
| VYFORM18 | — | — | 109 | 1.5 | 9% | 10 (Tris) | 7.4 | 410 |
| | | | | | (S) | | | |
| VYFORM19 | — | — | 100 | 1.5 | 7% | 10 (Tris); | 8.0 | — |
| | | | | | (S) | 6.3 (HCl) | | |
| VYFORM20 | — | — | 100 | 1.5 | 7% | 10 (Tris); | 7.5 | — |
| | | | | | (S) | 9 (HCl) | | |
| VYFORM21 | — | — | 75 | — | 5% | 10 (Tris) | — | — |
| | | | | | (S) | | | |
| VYFORM22 | — | — | 150 | — | 5% | 10 (Tris) | — | — |
| | | | | | (S) | | | |
| VYFORM23 | — | — | 150 | — | 5% | 10 (Tris); | — | — |
| | | | | | (S) | 10 (MgCl₂) | | |
| VYFORM24 | — | — | 75 | — | 5% | 10 (Tris); | — | — |
| | | | | | (S) | 75 (Arg) | | |
| VYFORM25 | — | — | 150 | — | 5% | 10 (Tris) | — | — |
| | | | | | (So) | | | |
| VYFORM26 | — | — | 150 | — | 5% | 10 (His) | — | — |
| | | | | | (S) | | | |
| VYFORM27 | — | 1.5 | — | — | 7% | 10 (Tris) | 8.0 | — |
| | | | | | (S) | | | |
| VYFORM28 | — | — | — | 75 | 5% | 10 (Tris) | — | — |
| | | | | | (S) | | | |
| VYFORM29 | 10 | — | 180 | — | — | — | | |

S = Sucrose (sugar)
T = Trehalose (sugar)
So = Sorbitol (sugar alcohol)
His = Histidine (other)
Tris = tris(hydroxymethyl)aminomethane (other)
Arg = Arginine (other)

[0921] In certain embodiments, the formulation may comprise sodium phosphate, potassium phosphate, sodium chloride, sucrose, and optionally a copolymer such as Poloxamer 188 (e.g. Pluronic F-68). In certain embodiments, the formulation may comprise 10 mM sodium phosphate, 1.5 mM potassium phosphate, 100 mM sodium chloride, 5% w/v Sucrose, and optionally Poloxamer 188 (buffer pH of 7.5). In certain embodiments, the formulation may comprise 10 mM sodium phosphate, 1.5 mM potassium phosphate, 220 mM sodium chloride, 5% w/v Sucrose, and optionally Poloxamer 188 (buffer pH of 7.5). In certain embodiments, the formulation may comprise 10 mM sodium phosphate, 1.5 mM potassium phosphate, 100 sodium chloride, 7% w/v Sucrose, and optionally Poloxamer 188 (buffer pH of 7.5).

[0922] In certain embodiments, the formulation may comprise sodium phosphate, potassium phosphate, sodium chloride, potassium chloride, sucrose or trehalose, and optionally a copolymer such as Poloxamer 188 (e.g. Pluronic F-68).

[0923] In certain embodiments, the formulation may comprise potassium phosphate, sodium chloride, potassium chloride, Histidine, a sugar, and optionally a copolymer such as Poloxamer 188 (e.g. Pluronic F-68).

[0924] In certain embodiments, the formulation may comprise sodium chloride, potassium chloride, sucrose, Tris, and optionally a copolymer such as Poloxamer 188 (e.g. Pluronic F-68).

[0925] In certain embodiments, the formulation may comprise sodium chloride, potassium chloride, sucrose, Tris, hydrochloric acid, and optionally a copolymer such as Poloxamer 188 (e.g. Pluronic F-68).

[0926] In certain embodiments, the formulation may comprise sodium chloride, sucrose, Tris, and optionally a copolymer such as Poloxamer 188 (e.g. Pluronic F-68),

[0927] In certain embodiments, the formulation may comprise sodium chloride, sucrose, Tris, magnesium chloride, and optionally a copolymer such as Poloxamer 188 (e.g. Pluronic F-68).

[0928] In certain embodiments, the formulation may comprise sodium chloride, sucrose. Tris, arginine and optionally a copolymer such as Poloxamer 188 (e.g. Pluronic F-68).

[0929] In certain embodiments, the formulation may comprise sodium chloride, sorbitol, Iris, and optionally a copolymer such as Poloxamer 188 (e.g. Pluronic F-68),

[0930] In certain embodiments, the formulation may comprise sodium chloride, sucrose, Histidine and optionally a copolymer such as Poloxamer 188 (e.g. Pluronic F-68).

[0931] In certain embodiments, the formulation may comprise sodium chloride, sucrose, and optionally a copolymer such as Poloxamer 188 (e.g, Pluronic F-68). In certain embodiments, the formulation may comprise 105 mM sodium chloride, 5% (w/v) sucrose, and optionally a copolymer such as Poloxamer 188. In certain embodiments, the formulation may comprise 95 mM sodium chloride, 5% (w/v) sucrose, and optionally a copolymer such as Poloxamer 188. In certain embodiments, the formulation may comprise 220 mM sodium chloride, 5% (w/v) sucrose, and optionally a copolymer such as Poloxamer 188.

[0932] In certain embodiments, the formulation may comprise potassium phosphate, sucrose, tris and optionally a copolymer such as Poloxamer 188 (e.g. Pluronic F-68).

[0933] In certain embodiments, the formulation may comprise potassium chloride, sucrose, tris and optionally a copolymer such as Poloxamer 188 (e.g. Pluronic F-68).

[0934] In certain embodiments, the formulation may comprise sodium chloride, Tris, and optionally a copolymer such as Poloxamer 188 (e.g, Pluronic F-68). In certain embodiments, the formulation may comprise 100 mM sodium chloride, 20 mM Tris, and optionally a copolymer such as Poloxamer 188 (mixture pH of 8.0). In certain embodiments, the formulation may comprise 220 mM. sodium chloride, 20 mM Tris, and optionally a copolymer such as Poloxamer 188 (mixture pH of 7.0-8.0). In certain embodiments, the formulation may comprise 290 mM sodium chloride, 20 mM Tris, and optionally a copolymer such as Poloxamer 188 (mixture pH of 8.0). In certain embodiments, the formulation may comprise 305 mM sodium chloride, 20 mM Tris, and optionally a copolymer such as Poloxamer 188 (mixture pH of 8.0). In certain embodiments, the formulation may comprise 2 M sodium chloride, 20 mM Tris, and optionally a copolymer such as Poloxamer 188 (mixture pH of 8.0). In certain embodiments, the formulation may comprise 170 mM sodium chloride, 40 mM Tris, and optionally a copolymer such as Poloxamer 188 (mixture OH of 8.5). In certain embodiments, the formulation may comprise 2 M sodium chloride, 1 M Tris, and optionally a copolymer such as Poloxamer 188 (mixture pH of 7.5).

[0935] In certain embodiments, the formulation may comprise sodium chloride, Tris-Bis Propane, and optionally a copolymer such as Poloxamer 188 (e.g. Pluronic F-68). In certain embodiments, the formulation may comprise 200 mM sodium chloride, 50 mM Tris-Bis Propane, and optionally a copolymer such as Poloxamer 188 (mixture pH of 9.0).

[0936] In certain embodiments, the formulation may comprise sodium phosphate, sodium chloride and optionally a copolymer such as Poloxamer 188. In certain embodiments, the formulation may comprise 10 mM sodium phosphate, 180 mM sodium chloride and optionally a copolymer such as Poloxamer 188 (mixture pH of 7.3). In certain embodiments, the formulation may include 10 mM sodium phosphate, 180 mM sodium chloride and 0.001% w/v Poloxamer 188 (mixture pH of 7.3). In certain embodiments, the formulation may comprise 20 mM sodium phosphate, 350 mM sodium chloride and optionally a copolymer such as Poloxamer 188 (mixture pH of 7.4). In certain embodiments, the formulation may comprise 50 mM sodium phosphate, 350 mM sodium chloride and optionally a copolymer such as Poloxamer 188 (mixture pH of 7.4).

[0937] In certain embodiments, the formulation may comprise sodium phosphate, potassium phosphate, potassium chloride, sodium chloride, and optionally a copolymer such as Poloxamer 188. In certain embodiments, the formulation may comprise 10 mM sodium phosphate, 2 mM Potassium Phosphate, 2.7 mM. Potassium Chloride, 192 mM Sodium Chloride, and optionally a copolymer such as Poloxamer 188 (mixture pH of 7.5).

[0938] In certain embodiments, the formulation may comprise sodium citrate, sodium chloride and optionally a copolymer such as Poloxamer 188. In certain embodiments, the formulation may comprise 20 mM sodium citrate, 1 M sodium chloride and optionally a copolymer such as Poloxamer 188 (mixture pH of 6.0). In certain embodiments, the formulation may comprise 10 mM sodium citrate, 350 mM sodium chloride and optionally a copolymer such as Poloxamer 188 (mixture pH of 6.0). In certain embodiments, the formulation may comprise 20 mM sodium citrate, 350 mM. sodium chloride and optionally a copolymer such as Poloxamer 188 (mixture pH of 3.0).

[0939] In certain embodiments, the formulation may comprise PBS. In certain embodiments, the formulation may comprise PBS and a sugar and/or a sugar substitute. The formulation may comprise 3-5% w/v) of the sugar and/or sugar substitute to increase stability of the formulation. As a non-limiting example, the formulation is PBS and 3% (w/v) sucrose (VYFORM30). As another non-limiting example, the formulation is PBS and 5% (w/v) sucrose (VYFORM31). As another non-limiting example, the formulation is PBS and 7% (w/v) sucrose, In certain embodiments, the AAV particles of the disclosure may be formulated in PBS, in combination with an ethylene oxide/propylene oxide copolymer (also known as pluronic or poloxamer).

[0940] In certain embodiments, the AAV particles of the disclosure may be formulated in PBS with 3% (w/v) sucrose and 0.001%-0.1% (w/v) of Poloxamer 188 (e.g. Pluronic F-68).

[0941] In certain embodiments, the AAV particles of the disclosure may be formulated in PBS with 5% (w/v) sucrose and 0.001%-0.1% (w/v) of Poloxamer 188 (e.g. Pluronic F-68).

[0942] In certain embodiments, the AAV particles of the disclosure may be formulated in PBS with 0.001%-0.1% (w/v) of Poloxamer 188 (e.g. Pluronic F-68) at a pH of about 7.0.

[0943] In certain embodiments, the AAV particles of the disclosure may be formulated in PBS with 0.001%-0.1% (w/v) of Poloxamer 188 (e.g. Pluronic F-68) at a pH of about 7.3.

[0944] In certain embodiments, the AAV particles of the disclosure may be formulated in PBS with 0.001%-0.1% (w/v) of Poloxamer 188 (e.g. Pluronic F-68) at a pH of about 7.4.

[0945] In certain embodiments, the AAV particles of the disclosure may be formulated in a solution comprising sodium chloride, sodium phosphate and an ethylene oxide/propylene oxide copolymer.

[0946] In certain embodiments, the AAV particles of the disclosure may be formulated in a solution comprising 95 mM sodium chloride, 5 mM sodium phosphate dibasic, 5 mM sodium phosphate monobasic, 1.5 mM potassium phosphate, 7% w/v sucrose, and 0.001% poloxamer 188 (e.g. Pluronic F-68).

[0947] In certain embodiments, the AAV particles of the disclosure may be formulated in a solution comprising about 180 mM sodium chloride, about 10 mM sodium phosphate and about 0.001% poloxamer 188, at a pH of about 7.3. The concentration of sodium chloride in the final solution may be 150 mM-200 mM. As non-limiting examples, the concentration of sodium chloride in the final solution may be 150 mM, 160 mM, 170 mM, 180 mM, 190 mM or 200 mM. The concentration of sodium phosphate in the final solution may be 1 mM-50 mM. As non-limiting examples, the concentration of sodium phosphate in the final solution may be 1 mM, 2 mM 3 mM, 4 mM, 5 mM, 6 mM 7 mM, 8 mM, 9 mM, 10 mM, 15 mM, 20 mM 25 mM, 30 mM, 40 mM, or 50 mM. The concentration of poloxamer 188 (Pluronic F-68) may be 0.0001%-1% (w/v). As non-limiting examples, the concentration of poloxamer 188 (Pluronic F-68) may be 0.0001%, 0.0005%, 0.001%, 0.005%, 0.01%, 0.05%, 0.1%, 0.5%, or 1% (w/v). The final solution may have a pH of 6.8-7.7. Non-limiting examples for the pH of the final solution comprise a pH of 6.8, 6.9, 7.0, 7.1, 7.2, 7.3, 7.4, 7.5, 7.6, or 7.7,

[0948] In certain embodiments, the AAV particles of the disclosure may be formulated in a solution comprising about 1.05% (w/v) sodium chloride, about 0.212% (w/v) sodium phosphate dibasic, heptahydrate, about 0.025% (w/v) sodium phosphate monobasic, monohydrate, and 0.001% (w/v) poloxamer 188, at a pH of about 7.4. As a non-limiting example, the concentration of AAV particle in this formulated solution may be about 0.001% (w/v). The concentration of sodium chloride in the final solution may be 0.1-2.0% (w/v), with non-limiting examples of 0.1%, 0.25%, 0.5%, 0.75%, 0.95%, 0.96%, 0.97%, 0.98%, 0.99%, 1.00%, 1.01%, 1.02%, 1.03%, 1.04%, 1.05%, 1.06%, 1.07%, 1.08%, 1.09%, 1.10%, 1.25%, 1.5%, 1.75%, or 2% (w/v). The concentration of sodium phosphate dibasic in the final solution may be 0.100-0.300% (w/v) with non-limiting examples comprising 0.100%, 0.125%, 0.150%, 0.175%, 0.200%, 0.210%, 0.211%, 0.212%, 0.213%, 0.214%, 0.215%, 0.225%, 0.250%, 0.275%, 0.300% (w/v). The concentration of sodium phosphate monobasic in the final solution may be 0.010-0.050% (w/v), with non-limiting examples of 0.010%, 0.015%, 0.020%, 0.021%, 0.022%, 0.023%, 0.024%, 0.025%, 0.026%, 0.027%, 0.028%, 0.029%, 0.030%, 0.035%, 0.040%, 0.045%, or 0.050% (w/v). The concentration of poloxamer 188 (Pluronic F-68) may be 0.0001%-1% (w/v). As non-limiting examples, the concentration of poloxamer 188 (Pluronic F-68)) may be 0.0001%, 0.0005%, 0.001%, 0.005%, 0.01%, 0.05%, 0,1%, 0.5%, or 1% (w/v). The final solution may have a pH of 6.8-7.7. Non-limiting examples for the pH of the final solution comprise a pH of 6.8, 6.9, 7.0, 7.1, 7.2, 7.3, 7.4, 7.5, 7.6, or 7.7.

[0949] In certain embodiments, the formulation comprises components with the following CAS (Chemical Abstracts Services) Registry Numbers, 7647-14-15 (sodium chloride), 7782-85-6 (sodium phosphate dibasic, heptahydrate), 10049-21-5 (sodium phosphate monobasic, monohydrate), and 9003-11-6 (poloxamer 188).

### Injectable Formulations

[0950] Injectable preparations, for example, sterile injectable aqueous or oleaginous suspensions may be formulated according to the known art using suitable dispersing agents, wetting agents, and/or suspending agents. Sterile injectable preparations may be sterile injectable solutions, suspensions, and/or emulsions in nontoxic parenterally acceptable diluents and/or solvents, for example, as a solution in 1,3-butanediol. Among the acceptable vehicles and solvents that may be employed are water, Ringer's solution, U.S.P., and isotonic sodium chloride solution. Sterile, fixed oils are conventionally employed as a solvent or suspending medium. For this purpose, any bland fixed oil can he employed comprising synthetic mono- or diglycerides. Fatty acids such as oleic acid can be used in the preparation of injectables.

[0951] Injectable formulations may be sterilized, for example, by filtration through a bacterial-retaining filter, and/or by incorporating sterilizing agents in the form of sterile solid compositions which can be dissolved or dispersed in sterile water or other sterile injectable medium prior to use.

[0952] In order to prolong the effect of active ingredients, it is often desirable to slow the absorption of active ingredients from subcutaneous or intramuscular injections. This may be accomplished by the use of liquid suspensions of crystalline or amorphous material with poor water solubility. The rate of absorption of active ingredients depends upon the rate of dissolution which, in turn, may depend upon crystal size and crystalline form. Alternatively, delayed absorption of a parenterally administered drug form is accomplished by dissolving or suspending the drug in an oil vehicle, Injectable depot forms are made by forming microencapsulated matrices of the drug in biodegradable polymers such as polylactide-polyglycolide. Depending upon the ratio of drug to polymer and the nature of the particular polymer employed, the rate of drug release can be controlled. Examples of other biodegradable polymers comprise poly(orthoesters) and poly(anhydrides). Depot injectable formulations are prepared by entrapping the drug in liposomes or microemulsions which are compatible with body tissues.

### Depot Formulations

[0953] In certain embodiments of the present disclosure, AAV particle formulations of the present disclosure are formulated in depots for extended release. Generally, specific organs or tissues (“target tissues”) are targeted for administration.

[0954] In certain embodiments of the disclosure, pharmaceutical compositions, AAV particle formulations of the present disclosure are spatially retained within or proximal to target tissues. Provided are methods of providing pharmaceutical compositions, AAV particle formulations, to target tissues of mammalian subjects by contacting target tissues (which comprise one or more target cells) with pharmaceutical compositions, AAV particle formulations, under conditions such that they are substantially retained in target tissues, meaning that at least 10, 20, 30, 40, 50, 60, 70, 80, 85, 90, 95, 96, 97, 98, 99, 99.9, 99.99 or greater than 99.99% of the composition is retained in the target tissues. Advantageously, retention is determined by measuring the amount of pharmaceutical compositions, AAV particle formulations, that enter one or more target cells. For example, at least 1%, 5%, 10%, 20%, 30%, 40%, 50%, 60%, 70%, 80%, 85%, 90%, 95%, 96%, 97%, 98%, 99%, 99.9%, 99.99% or greater than 99.99% of pharmaceutical compositions, AAV particle formulations, administered to subjects are present intracellularly at a period of time following administration.

[0955] Certain aspects of the disclosure are directed to methods of providing pharmaceutical compositions, AAV particle formulations of the present disclosure to a target tissues of mammalian subjects, by contacting target tissues (comprising one or more target cells) with pharmaceutical compositions, AAV particle formulations under conditions such that they are substantially retained in such target tissues. Pharmaceutical compositions, AAV particles comprise enough active ingredient such that the effect of interest is produced in at least one target cell.

### IV. Administration

### Administration

[0956] The present disclosure provides methods of administering AAV particles in accordance with the present disclosure to a subject in need thereof In certain embodiments, the formulated AAV particle may be administered to a subject for the treatment of various diseases, disorders and/or conditions. In certain embodiments, the AAV particle may be administered to a subject in a therapeutically effective amount to reduce the symptoms of disease of a subject (e.g., determined using a known evaluation method).

[0957] The present disclosure provides a method of delivering to a cell or tissue the AAV particles of the present disclosure, comprising contacting the cell or tissue with said AAV particle or contacting the cell or tissue with a formulation comprising said AAV particle, or contacting the cell or tissue with any of the described compositions, comprising pharmaceutical compositions. The method of delivering the AAV particle to a cell or tissue can be accomplished in vitro, ex vivo, or in vivo.

[0958] The present disclosure provides a method of delivering to a subject, comprising a mammalian subject, an AAV particle of the present disclosure comprising administering to the subject said AAV particle, or administering to the subject a formulation comprising said AAV particle, or administering to the subject any of the described compositions, comprising pharmaceutical compositions.

[0959] In certain embodiments, the AAV particles and formulations of the present disclosure may be administered by any delivery route which results in a therapeutically effective outcome. These comprise, but are not limited to, enteral (into the intestine), gastroenteral, epidural (into the dura mater), oral (by way of the mouth), transdermal, intracerebral (into the cerebrum), intracerebroventricular (into the cerebral ventricles), sub-pial (between pia and CNS parenchyma), intracarotid arterial (into the intracarotid artery), epicutaneous (application onto the skin), intradermal, (into the skin itself), subcutaneous (under the skin), nasal administration (through the nose), intravenous (into a vein), intravenous bolus, intravenous drip, intra-arterial (into an artery), systemic, intramuscular (into a muscle), intracardiac (into the heart), intraosseous infusion (into the bone marrow), intrathecal (into the spinal canal), intraparenchymal (the body of a tissue or organ, e.g., brain, spinal cord, etc.), intraperitoneal, (infusion, or injection into the peritoneum), intravesical infusion, intravitreal, (through the eye), intracavernous injection (into a pathologic cavity) intracavitary (into the base of the penis), intravaginal administration, intrauterine, extra-amniotic administration, transdermal (diffusion through the intact skin for systemic distribution), transmucosal (diffusion through a mucous membrane), transvaginal, insufflation (snorting), sublingual, sublabial, enema, eye drops (onto the conjunctiva), or in ear drops, auricular (in or by way of the ear), buccal (directed toward the cheek), conjunctival, cutaneous, dental (to a tooth or teeth), electro-osmosis, endocervical, endosinusial, endotracheal, extracorporeal, hemodialysis, infiltration, interstitial, intraabdominal, intra-amniotic, intra-articular, intrabiliary, intrabronchial, intrabursal, intracartilaginous (within a cartilage), intracaudal (within the cauda equine), intracisternal (within the cisterna magna cerebellomedularis), intracorneal (within the cornea), dental intracoronal, intracorona, (within the coronary arteries), intracorporus cavernosum (within the dilatable spaces of the corporus cavernosa of the penis), intradiscal (within a disc), intraductal (within a duct of a gland), intraduodenal (within the duodenum), intradural (within or beneath the dura), intmepideimal (to the epidermis), intraesophageal (to the esophagus), intragastric (within the stomach), intragingival (within the gingivae), intraileal (within the distal portion of the small intestine), intralesional (within or introduced directly to a localized lesion), intraluminal (within a lumen of a tube), intralytnphatic (within the lymph), intramedullary (within the marrow cavity of a bone), intrameningeal (within the meninges), intramyocardial (within the myocardium), intraocular (within the eve), intraovarian (within the ovary), intrapericardial (within the pericardium), intrapleural (within the pleura), intraprostatic (within the prostate gland), intrapulmonary (within the lungs or its bronchi). intrasinal (within the nasal or periorbital sinuses), intraspinal (within the vertebral column), intrasynovial (within the synovial cavity of a joint), intratendinous (within a tendon), intratesticular (within the testicle), intrathecal (within the cerebrospinal fluid at any level of the cerebrospinal axis), intrathoracic (within the thorax), intratubular (within the tubules of an organ), intratumor (within a tumor), intratympanic (within the aurus media), intravascular (within a vessel or vessels), intraventricular (within a ventricle), iontophoresis (by means of electric current where ions of soluble salts migrate into the tissues of the body), irrigation (to bathe or flush open wounds or body cavities), laryngeal (directly upon the larynx), nasogastric (through the nose and into the stomach), occlusive dressing technique (topical route administration which is then covered by a dressing which occludes the area), ophthalmic (to the external eye), oropharyngeal (directly to the mouth and pharynx), parenteral, percutaneous, periarticular, peridural, perineural, periodontal, rectal, respiratory (within the respiratory tract by inhaling orally or nasally for local or systemic effect), retrobulbar (behind the pons or behind the eyeball), soft tissue, subarachnoid, subconjunctival, submucosal, topical, transplacental (through or across the placenta), transtracheal (through the wall of the trachea), transtympanic (across or through the tympanic cavity), ureteral (to the ureter), urethral (to the urethra), vaginal, caudal block, diagnostic, nerve block, biliary perfusion, cardiac perfusion, photopheresis and spinal.

[0960] In certain embodiments, compositions may be administered in a way which allows them to cross the blood-brain barrier, vascular barrier, or other epithelial barrier. The AAV particles of the present disclosure may be administered in any suitable form., either as a liquid solution or suspension, as a solid form suitable for liquid solution or suspension in a liquid solution. The AAV particles may be formulated with any appropriate and pharmaceutically acceptable excipient. In certain embodiments, a composition of the present disclosure is administered to a subject in need intravenously, intramuscularly, subcutaneously, intraperitoneally, intraparenchymally, intrathecally and/or intraventricularly, allowing the formulated AAV particles to pass through one or bath the blood-brain barrier and the blood spinal cord barrier.

[0961] The present disclosure provides methods of administering AAV particles in accordance with the present disclosure to the CNS of a subject in need thereof. In certain embodiments, the AAV particle may be administered to the CNS of a subject in a therapeutically effective amount to reduce the symptoms of a neurological disease of a subject, as determined using a known evaluation method.

[0962] In certain embodiments, the composition comprising the formulated AAV particles of the present disclosure is administered to the central nervous system of the subject via systemic administration. In certain embodiments, the systemic administration is intravenous injection.

[0963] In certain embodiments, the composition comprising the formulated AAV particles of the present disclosure is administered to the central nervous system of the subject via intraparenchymal injection. Non-limiting examples of intraparenchymal injections comprise intrathalamic, intrastriatal (e.g. intraputamenal), intrahippocampal or targeting the entorhinal cortex.

[0964] In certain embodiments, the administration into the CNS is via multiple administrations, e.g., more than one, route and/or location. Such administration may be sequential or simultaneous. In certain embodiments, the administration is into the central nervous system of the subject via more than one route, e.g., intraparenchymal injection and intrathecal injection.

[0965] In certain embodiments, the administration is via multiple administrations, e.g., more than one, route and/or location. Such administration may be sequential or simultaneous.

[0966] In certain embodiments, the formulated AAV particles of the present disclosure may be delivered into specific types of targeted cells, comprising, but not limited to, hippocampal, cortical, motor or entorhinal neurons; glial cells comprising oligodendrocytes. astrocytes and microglia; and/or other cells surrounding neurons such as T cells.

[0967] In certain embodiments, the formulated AAV particles or pharmaceutical compositions of the present disclosure may be administered or delivered using the methods for treatment of disease described in U.S. Pat. No. 8,999,948, or International Publication No. WO2014178863, the contents of which are herein incorporated by reference in their entirety.

[0968] In certain embodiments, the formulated AAV particles or pharmaceutical compositions of the present disclosure may be administered or delivered using the methods for delivering gene therapy in Alzheimer's Disease or other neurodegenerative conditions as described in US Application No. 20150126590, the contents of which are herein incorporated by reference in their entirety.

[0969] In certain embodiments, the formulated AAV particles or pharmaceutical compositions of the present disclosure may be administered or delivered using the methods for delivery of a CNS gene therapy as described in U.S. Pat. Nos. 6,436,708, and 8,946,152, and International Publication No. WO2015168666, the contents of which are herein incorporated by reference in their entirety.

[0970] In certain embodiments, the formulated AAV particle or pharmaceutical compositions of the present disclosure may be administered or delivered using the methods for delivering proteins using AAV panicles described in European Patent Application No. EP2678433, the contents of which are herein incorporated by reference in their entirety.

[0971] In certain embodiments, the formulated AAV particle or pharmaceutical compositions of the present disclosure may be administered or delivered using the methods for delivering DNA to the bloodstream described in U.S. Pat. No. 6,211,163, the contents of which are herein incorporated by reference in their entirety.

[0972] In certain embodiments, the formulated AAV particle or pharmaceutical compositions of the present disclosure may be administered or delivered using the methods for delivering a payload to the central nervous system described in U.S. Pat. No. 7,588,757, the contents of which are herein incorporated by reference in their entirety.

[0973] In certain embodiments, the thrmulated AAV particle or pharmaceutical compositions of the present disclosure may be administered or delivered using the methods for delivering; a payload described in U.S. Pat. No. 8,283,151, the contents of which are herein incorporated by reference in their entirety.

[0974] In certain embodiments, the formulated AAV particle or pharmaceutical compositions of the present disclosure may be administered or delivered using the methods for delivering a payload using a glutamic acid decarboxylase (GAD) delivery vector described in International Patent Publication No. WO2001089583, the contents of which are herein incorporated by reference in their entirety.

[0975] In certain embodiments, the formulated AAV particle or pharmaceutical compositions of the present disclosure may be administered or delivered using the methods for delivering a payload to neural cells described in International Patent Publication No. WO2012057363, the contents of which are herein incorporated by reference in their entirety.

[0976] In certain embodiments, the formulated AAV particle or pharmaceutical compositions of the present disclosure may be administered or delivered using the methods for delivering a payload to neural cells described in International Patent Application No. PCT/US2018/042391, the contents of which are herein incorporated by reference in their entirety.

[0977] In certain embodiments, the formulated AAV particle or pharmaceutical compositions of the present disclosure may be administered or delivered using the methods for delivering a payload by intramuscular delivery route described in U.S. Pat. No. 6,506,379; the content of which is incorporated herein by reference in its entirety. Non-limiting examples of intramuscular administration comprise an intravenous injection or a subcutaneous injection.

[0978] In certain embodiments, the AAV particle formulations of the present disclosure may be delivered by oral administration. Non-limiting examples of oral administration comprise a digestive tract administration and a buccal administration.

[0979] In certain embodiments, the AAV particle formulations of the present disclosure may be delivered by intraocular delivery route. A non-limiting example of intraocular administration comprise an intravitreal injection.

[0980] In certain embodiments, the AAV particles that may be administered to a subject by peripheral injections. Non-limiting examples of peripheral injections comprise intraperitoneal, intramuscular, intravenous, conjunctival or joint injection. It was disclosed in the art that the peripheral administration of AAV particles can be transported to the central nervous system, for example, to the motor neurons (e.g., U.S. Patent Publication Nos. 20100240739; and 20100130594; the content of each of which is incorporated herein by reference in their entirety).

[0981] In certain embodiments, the AAV particle formulations may be delivered by injection into the CSF pathway. Non-limiting examples of delivery to the CSF pathway comprise intrathecal and intracerebroventricular administration.

[0982] In certain embodiments, the AAV particle formulations may be delivered by systemic delivery. As a non-limiting example, the systemic delivery may be by intravascular administration.

[0983] In certain embodiments, the AAV particle formulations of the present disclosure may be administered to a subject by intracranial delivery (See. e.g., U.S. Pat. No. 8,119,611; the content of which is incorporated herein by reference in its entirety).

[0984] In certain embodiments, the AAV particle formulations of the present disclosure may be administered by injection. As a non-limiting example, the AAV particles of the present disclosure may be administered to a subject by injection.

[0985] In certain embodiments, the AAV particle formulations of the present disclosure may be administered by muscular injection. As a non-limiting example, the AAV particles of the present disclosure may be administered to a subject by muscular administration.

[0986] In certain embodiments, the AAV particle formulations of the present disclosure may be administered by intramuscular administration. As a non-limiting example, the AAV particles of the present disclosure may be administered to a subject by intramuscular administration.

[0987] In certain embodiments, the AAV particles of the present disclosure are administered to a subject and transduce muscle of a subject.

[0988] In certain embodiments, the AAV particle formulations of the present disclosure may be administered via intraparenchymal injection. As a non-limiting example, the AAV particles of the present disclosure may be administered to a subject by intraparenchymal administration.

[0989] In certain embodiments, the AAV particle formulations of the present disclosure may be administered by intravenous administration. In certain embodiments, the AAV particle formulations of the present disclosure may be administered via a single dose intravenous delivery. As a non-limiting example, the single dose intravenous delivery may be a one-time treatment. In the context of gene therapy, the single dose intravenous delivery can produce durable relief for subjects. The relief may last for minutes such as, but not limited to, 1, 2, 3, 4, 5, 6, 7, 8, 9, 10, 11, 12, 13, 14, 15, 16, 17, 18, 19, 20, 21, 22, 23, 24, 25, 26, 27, 28, 29, 30, 31, 32 33 34, 35, 36, 37, 38, 39, 40, 41, 42, 43, 44, 45, 46, 47, 48, 49, 50, 51, 52, 53, 54, 55, 56, 57, 58, 59 minutes or more than 59 minutes; hours such as, but not limited to, 1, 2, 1, 2, 3, 4, 5, 6, 7, 8, 9, 10, 11, 12, 13, 14, 15, 16, 17, 18, 19, 20, 21, 22, 23, 24, 25, 26, 27, 28, 29, 30, 31, 32, 33, 34, 35, 36, 37, 38, 39, 40, 41, 42, 43, 44, 45, 46, 47, 48, or more than 48 hours; days such as, but not limited to, 1, 2, 3, 4, 5, 6, 7, 8, 9, 10, 11, 12, 13, 14, 15, 16, 17, 18, 19, 20, 21, 22, 23, 24, 25, 26, 27, 28, 29, 30, 31, or more than 31 days; weeks such as, but not limited to, 1, 2, 3, 4, 5, 6, 7, 8, 9, 10, 11, 12, 13, 14, 15, 16, or more than 16 weeks; months such as, but not limited to, 1, 2, 3, 4, 5, 6, 7, 8, 9, 10, 11, 12, 13, 14, 15, 16, 17, 18, 19, 20, 21, 22, 23, 24, or more than 24 months; years such as, but not limited to, 1, 2, 3, 4, 5, 6, 7, 8, 9, 10, 11, 12, 13, 14, 15, or more than 15 years.

[0990] In certain embodiments, the AAV particle formulations of the present disclosure may be administered via intravenous delivery to the DRG nociceptive neurons. In certain embodiments, the AAV particle formulations of the present disclosure may be administered via a single dose intravenous delivery to the DRG nociceptive neurons. As a non-limiting example, the single dose intravenous delivery may he a one-time treatment. The relief may last for minutes such as, but not limited to, 1, 2, 3, 4, 5, 6, 7, 8, 9, 10, 11, 12, 13, 14, 15, 16, 17, 18, 19, 20, 21, 22, 23, 24, 25, 26, 27, 28, 29, 30, 31, 32, 33, 34, 35, 36, 37, 38, 39, 40, 41, 42, 43, 44, 45, 46, 47, 48, 49, 50, 51, 52, 53, 54, 55, 56, 57, 58, 59 minutes or more than 59 minutes; hours such as, but not limited to, 1, 2, 1, 2, 3, 4, 5, 6, 7, 8, 9, 10, 11, 12, 13, 14, 15, 16, 17, 18, 19, 20, 21, 22, 23, 24, 25, 26, 27, 28, 29, 30, 31, 32, 33, 34, 35, 36, 37, 38, 39, 40, 41, 42, 43, 44, 45, 46, 47, 48, or more than 48 hours; days such as, but not limited to, 1, 2, 3, 4, 5, 6, 7, 8, 9, 10, 11, 12, 13, 14, 15, 16, 17, 18, 19, 20, 21, 22, 23, 24, 25, 26, 27, 28, 29, 30, 31, or more than 31 days; weeks such as, but not limited to, 1, 2, 3, 4, 5, 6, 7, 8, 9, 10, 11, 12, 13, 14, 15, 16, or more than 16 weeks; months such as, but not limited to, 1, 2, 3, 4, 5, 6, 7, 8, 9, 10, 11, 12, 13, 14, 15, 16, 17, 18, 19, 20, 21, 22, 23, 24, or more than 24 months; years such as, but not limited to, 1, 2, 3, 4, 5, 6, 7, 8, 9, 10, 11, 12, 13, 14, 15, or more than 15 years.

[0991] In certain embodiments, the AAV particle formulations of the present disclosure may be administered intrathecally, such as by intrathecal injection. In certain embodiments, the AAV particle formulations may be administered to the cisterna magna in a therapeutically effective amount to transduce spinal cord motor neurons and/or astrocytes. As a non-limiting example, the AAV particle formulations may be administered intrathecally. In certain embodiments, the AAV particle formulations of the present disclosure may be administered via a single dose intrathecal injection. As a non-limiting example, the single dose intrathecal injection may he a one-time treatment and the single dose intrathecal injection can produce durable relief for subjects. The relief may last for minutes such as, but not limited to, 1, 2, 3, 4, 5, 6, 7, 8, 9, 10, 11, 12, 13, 14, 15, 16, 17, 18, 19, 20, 21, 22, 23, 24, 25, 26, 27, 28, 29, 30, 31, 32, 33, 34, 35, 36, 37, 38, 39, 40, 41, 42, 43, 44, 45, 46, 47, 48, 49, 50, 51, 52, 53, 54, 55, 56, 57, 58, 59 minutes or more than 59 minutes; hours such as, but not limited to, 1, 2, 1, 2, 3, 4, 5, 6, 7, 8, 9, 10, 11, 12, 13, 14, 15, 16, 17, 18, 19, 20, 21, 22, 23, 24, 25, 26, 27, 28, 29, 30, 31, 32, 33, 34, 35, 36, 37, 38, 39, 40, 41, 42, 43, 44, 45, 46, 47, 48, or more than 48 hours; days such as, but not limited to, 1, 2, 3, 4, 5, 6, 7, 8, 9, 10, 11, 12, 13, 14, 15, 16, 17, 18, 19, 20, 21, 22, 23, 24, 25, 26, 27, 28, 29, 30, 31, or more than 31 days; weeks such as, but not limited to, 1, 2, 3, 4, 5, 6, 7, 8, 9, 10, 11, 12, 13, 14, 15, 16, or more than 16 weeks; months such as, but not limited to, 1, 2, 3, 4, 5, 6, 7, 8, 9, 10, 11, 12, 13, 14, 15, 16, 17, 18, 19, 20, 21, 22, 23, 24, or more than 24 months; years such as, but not limited to, 1, 2, 3, 4, 5, 6, 7, 8, 9, 10, 11, 12, 13, 14, 15, or more than 15 years.

[0992] In certain embodiments, the AAV particle formulations of the present disclosure may be administered via intrathecal injection to the DRG nociceptive neurons. In certain embodiments, the AAV particle formulations of the present disclosure may be administered via a single dose intrathecal injection to the DRG nociceptive neurons. As a non-limiting example, the single dose intrathecal injection may be a one-time treatment. In the context of gene therapy, the single dose intrathecal injection can produce durable relief for subjects. The relief may last for minutes such as, but not limited to, 1, 2, 3, 4, 5 6, 7, 8, 9, 10, 11, 12, 13, 14, 15, 16, 17, 18, 19, 20, 21, 22, 23, 24, 25, 26, 27, 28, 29, 30, 31, 32, 33, 34, 35, 36, 37, 38, 39, 40, 41, 42. 43, 44, 45, 46, 47, 48, 49, 50, 51, 52, 53, 54, 55, 56, 57, 58, 59 minutes or more than 59 minutes; hours such as, but not limited to, 1, 2, 1, 2, 3, 4, 5, 6, 7, 8, 9, 10, 11, 12, 13, 14, 15, 16, 17, 18, 19, 20, 21, 22, 23, 24, 25, 26, 27, 28, 29, 30, 31, 32, 33, 34, 35, 36 37, 38, 39, 40, 41, 42, 43, 44, 45, 46, 47, 48, or more than 48 hours; days such as, but not limited to, 1, 2, 3, 4, 5, 6, 7, 8, 9, 10, 11, 12, 13, 14, 15, 16, 17, 18, 19, 20, 21, 22, 23, 24, 25, 26, 27, 28, 29, 30, 31, or more than 31 days; weeks such as, but not limited to, 1, 2, 3, 4, 5, 6, 7, 8, 9, 10, 11, 12, 13, 14, 15, 16, or more than 16 weeks; months such as, but not limited to, 1, 2, 3, 4, 5, 6, 7, 8, 9, 10, 11, 12, 13, 14, 15, 16, 17, 18, 19, 20, 21, 22, 23, 24, or more than 24 months; years such as, but not limited to, 1, 2, 3, 4, 5, 6, 7, 8, 9, 10, 11, 12, 13, 14, 15, or more than 15 years.

[0993] In certain embodiments, the formulated AAV particle described herein is administered via intrathecal (IT) infusion at Cl. The infusion may be for 1, 2, 3, 4, 6, 7, 8, 9, 10, 11, 12, 13, 14, 15 or more than 15 hours.

[0994] In certain embodiments, the AAV particle formulations of the present disclosure may be administered by intraparenchymal injection. In certain embodiments, the formulated AAV particle may be administered via intraparenchymal injection to the cisterna magna in a therapeutically effective amount to transduce spinal cord motor neurons and/or astrocytes.

[0995] In certain embodiments, the AAV particle formulations of the present disclosure may be administered by intraparenchymal injection and intrathecal injection.

[0996] In certain embodiments, the AAV particle formulations of the present disclosure may be administered by subcutaneous injection.

[0997] In certain embodiments, the AAV particle formulations may be delivered by direct injection into the brain. In certain embodiments, the AAV particle formulations of the present disclosure may be administered via intrastriatal injection, comprising injection into one or more putamen. In certain embodiments, the AAV particle formulations of the present disclosure may be administered via intrastriatal injection and another route of administration described herein.

[0998] In certain embodiments, the AAV particle formulations may be delivered by more than one route of administration. As non-limiting examples of combination administrations, AAV particles may be delivered by intrathecal and intracerebroventricular, or by intravenous and intraparenchymal administration.

[0999] In certain embodiments, the formulated AAV particle may be administered to the CNS in a therapeutically effective amount to improve function and/or survival for a subject. As a non-limiting example, the vector may be administered by direct infusion into the striatum,

[1000] In certain embodiments, the formulated AAV particle may be administered in a “therapeutically effective” amount, i.e., an amount that is sufficient to alleviate and/or prevent at least one symptom associated with the disease or provide improvement in the condition of the subject.

[1001] In certain embodiments, the catheter may be located at more than one site in the spine for multi-site delivery. The formulated AAV particle may be delivered in a continuous and/or bolus infusion. Each site of delivery may be a different dosing regimen or the same dosing regimen may be used for each site of delivery. As a non-limiting example, the sites of delivery may be in the cervical and the lumbar region. As another non-limiting example, the sites of delivery may be in the cervical region. As another non-limiting example, the sites of delivery may be in the lumbar region.

[1002] In certain embodiments, a subject may be analyzed for spinal anatomy and pathology prior to delivery of the AAV particle described herein. As a non-limiting example, a subject with scoliosis may have a different dosing regimen and/or catheter location compared to a subject without scoliosis.

[1003] In certain embodiments, the orientation of the spine of the subject during delivery of the formulated AAV particle may be vertical to the ground.

[1004] In another embodiment, the orientation of the spine of the subject during delivery of the formulated AAV particle may be horizontal to the ground.

[1005] In certain embodiments, the spine of the subject may be at an angle as compared to the ground during the delivery of the AAV particle formulations. The angle of the spine of the subject as compared to the ground may be at least 10, 20, 30, 40, 50, 60, 70, 80, 90, 100, 110, 120, 130, 140, 150 or 180 degrees.

[1006] In certain embodiments, the delivery method and duration are chosen to provide broad transduction in the spinal cord. As a non-limiting example, intrathecal delivery is used to provide broad transduction along the rostral-caudal length of the spinal cord. As another non-limiting example, multi-site infusions provide a more uniform transduction along the rostral-caudal length of the spinal cord. As yet another non-limiting example, prolonged infusions provide a more uniform transduction along the rostral-caudal length of the spinal cord.

### Dosage and Regimen

[1007] The pharmaceutical, diagnostic, or prophylactic AAV particles, formulations and compositions of the present disclosure may be administered to a subject using any amount and any route of administration effective for preventing, treating, managing, or diagnosing diseases, disorders and/or conditions. The exact amount required will vary from subject to subject, depending on the species, age, and general condition of the subject, the severity of the disease, the particular composition, its mode of administration, its mode of activity, and the like. The subject may be a human, a mammal, or an animal. Compositions in accordance with the present disclosure are typically formulated in unit dosage form for ease of administration and uniformity of dosage. It will be understood, however, that the total daily usage of the compositions of the present disclosure may be decided by the attending physician within the scope of sound medical judgment. The specific therapeutically effective, prophylactically effective, or appropriate diagnostic dose level for any particular individual will depend upon a variety of factors comprising the disorder being treated and the severity of the disorder; the activity of the specific payload employed; the specific composition employed; the age, body weight, general health, sex and diet of the patient; the time of administration, route of administration, and rate of excretion of the specific AAV particle employed; the duration of the treatment; drugs used in combination or coincidental with the specific AAV particle employed; and like factors well known in the medical arts. In certain embodiments, delivery of the formulated AAV particles of the present disclosure results in minimal serious adverse events (SAEs) as a result of the delivery of the formulated AAV particles.

[1008] Traditionally, in order to achieve a sufficiently high quantity of a standard therapeutic (ensuring long lasting therapeutic effects), many therapies are delivered by repeated or extended administration, e.g. by multiple injections or long infusions. However, these extended dosing regimens are not well suited for certain AAV gene therapy modalities, such as those driven by single dose paradigms. Extended AAV dosing regimens can be particularly problematic in the treatment of CNS diseases due to limited volumetric space for formulation fluids, strinaent limitations on excipient quantity and potency, impact of ionic particles on CNS micro-environment, and surgical and clinical complications related to extended CNS treatments. Novel formulations of gene therapy modalities are necessary to achieve sufficiently high concentrations of therapeutic agents within the formulation.

[1009] In certain embodiments, formulated AAV particle pharmaceutical compositions in accordance with the present disclosure may be administered at dosage levels sufficient to deliver from about 0.0001 mg/kg to about 100 mg/kg, from about 0.001 mg/kg to about 0.05 ma/kg, from about 0.005 mg/kg to about 0.05 mg/kg, from about 0.001 mg/kg to about 0.005 mg/kg, from about 0.05 mg/kg to about 0.5 mg/kg, from about 0.01 mg/kg to about 50 mg/kg, from about 0.1 mg/kg to about 40 mg/kg, from about 0.5 mg/kg to about 30 mg/kg, from about 0.01 mg/kg to about 10 mg/kg, from about 0.1 mg/kg to about 10 mg/kg, or from about 1 mg/kg to about 25 mg/kg, of subject body weight per day, one or more times a day, to obtain the desired therapeutic, diagnostic, or prophylactic, effect. It will be understood that the above dosing concentrations may be converted to vg or viral genomes per kg or into total viral genomes administered by one of skill in the art.

[1010] In certain embodiments, formulated AAV particle pharmaceutical compositions in accordance with the present disclosure may be administered at about 10 to about 600 μl/site, 50 to about 500 μl/site, 100 to about 400 μl/site, 120 to about 300 μl/site, 140 to about 200 μl/site, about 160 μl/site. As non-limiting examples, AAV particles may be administered at 50 μl/site and/or 150 μl/site.

[1011] In certain embodiments, delivery of the compositions in accordance with the present disclosure to cells comprises a rate of delivery defined by [VG/hour=ml/hour*VG/mL] wherein VG is viral genomes, VG/mL is composition concentration, and mL/hour is rate of prolonged delivery.

[1012] In certain embodiments, delivery of compositions in accordance with the present disclosure to cells may comprise a total concentration per subject between about 1×10⁶ VG and about 1×10¹⁶ VG. In certain embodiments, delivery may comprise a composition concentration of about 1×10⁶, 2×10⁶, 3×10⁶, 4×10⁶, 5×10⁵, 6×10⁶, 7×10⁶, 8×10⁶, 9×10⁶, 1×10⁷, 2×10⁷, 3×10⁷, 4×10⁷, 5×10⁷, 6×10⁷, 7×10⁷, 8×10⁷, 9×10⁷, 1×10⁸, 2×10⁸, 3×10⁸, 4×10⁸, 5×10⁸, 6×10⁸, 7×10⁸, 8×10⁸, 9×10⁸, 1×10⁹, 2×10⁹, 3×10⁹, 4×10⁹, 5×10⁹, 6×10⁹, 7×10⁹, 8×10⁹, 9×10⁹, 1×10¹⁰, 2×10¹⁹, 3×10¹⁰, 4×10¹⁰, 5×1¹⁰, 6×10¹⁰, 7×10¹⁰, 8×10¹⁰, 9×10¹⁰, 1×10¹¹, 2×10¹¹, 2.1×10¹¹, 2.2×10¹¹, 2.3×10¹¹, 2.4×10¹¹, 2.5×10¹¹, 2.6×10¹¹, 2.7×10¹¹, 2.8×10¹¹, 2.9×10¹¹, 3×10¹¹, 4×10¹¹, 5×10¹¹, 6×10¹¹, 7×10¹¹, 7.1×10¹¹, 7.2×10¹¹, 7.3×10¹¹, 7.4×10¹¹, 7.5×10¹¹, 7.6×10¹¹, 7.7×10¹¹, 7.8×10¹¹, 7.9×10¹¹, 8×10¹¹, 9×10¹¹, 1×10¹², 1.1×10¹², 1,2×10¹², 1.3×10¹², 1.4×10¹², 1.5×10¹², 1.6×10¹², 1.7×10¹², 1.8×10¹², 1.9×10¹², 2×10¹², 3×10¹², 4×10¹², 4.1×10¹², 4.2×10¹², 4.3×10¹², 4.4×10¹², 4.5×10¹², 4.6×10¹², 4.7×10¹², 4.8×10¹², 4.9×10¹², 5×10¹², 6×10¹², 7×10¹², 8×10¹², 8.1×10¹², 8.2×10¹², 8.3×10¹², 8.4×10¹², 8.5×10¹², 8.6×10¹², 8.7×10¹², 8.8×10¹², 9×10¹², 9×10¹², 1×10¹³, 2×10¹³, 3×10¹³, 4×10¹², 5×10¹³, 6×10¹³, 6.7×10¹³, 7×10¹³, 8×10¹³ 9×10¹³, 1×10¹⁴, 2×10¹⁴, 3×10¹⁴, 4×10¹⁴, 5×10¹⁴, 6×10¹⁴, 7×10¹⁴, 8×10¹¹, 9×10¹⁴, 1×10¹⁵, 2×10¹⁵, 3×10¹⁵, 4×10¹⁵, 5×10¹⁵, 6×10¹⁵, 7×10¹⁵, 8×10¹⁵, 9×10¹⁵, or 1×10¹⁶ VG/subject or VG/dose.

[1013] In certain embodiments, delivery of compositions in accordance with the present disclosure to cells may comprise a total concentration per subject between about 1×10⁶ VG/kg and about 1×10¹⁶ VG/kg. In certain embodiments, delivery may comprise a composition concentration of about 1×10⁶, 2×10⁶, 3×10⁶, 4×10⁶, 5×10⁶ 6×10⁶, 7×10⁶, 8×10⁶, 9×10⁶, 1×10⁷, 2×10⁷, 3×10⁷, 4×10⁷, 5×10⁷, 6×10⁷, 7×10⁷, 8×10⁷, 9×10⁷, 1×10⁸, 2×10⁸, 3×10⁸, 4×10⁸, 5×10⁸, 6×10⁸, 7×10⁸, 8×10⁵, 9×10⁸, 1×10⁹, 2×10⁹, 3×10⁹, 4×10⁹, 5×10⁹, 6×10⁹, 7×10⁹, 8×10⁹, 9×10⁹, 1×10¹⁶, 2×10¹⁰, 3×10¹⁰, 4×10¹⁹, 5×10¹⁹, 6×1e, 7×10¹⁹, 8×10¹⁰, 9×10¹⁰, 1×10¹¹, 2×10¹¹, 2.1×10¹¹, 2.2×10¹¹, 2.3×10¹¹, 2.4×10¹¹, 2.5×10¹¹, 2.6×10¹¹, 2.7×10¹¹, 2.8×10¹¹, 2.9×10¹¹, 3×10¹¹, 4×10¹¹, 5×10¹¹, 6×10¹¹, 7×10¹¹, 7.1×10¹¹, 7.2×10¹¹, 7.3×10¹¹, 7.4×10¹¹, 7.5×10¹¹, 7.6×10¹¹, 7.7×10¹¹, 7.8×10¹¹, 7.9×1.0¹¹, 8×10¹¹, 9×10¹¹, 1×10¹², 1.1 ×10¹², 1.2×10¹², 1.3×10¹², 1.4×10¹², 1.5×10¹², 1.6×10¹², 1.7×10¹², 1.8×10¹², 1.9×10¹², 2×10¹², 3×10¹², 4×10¹², 4.1×10¹², 4.2×10¹², 4.3×10¹², 4.4×10¹², 4.5×10¹², 4.6×10¹², 4.7×10¹², 4.8×10¹², 4.9×10¹², 5×10¹², 6×10¹², 7×10¹², 8×10¹², 8.1×10¹², 8.2×10¹², 8.3×10¹², 8.4×10¹², 8.5×10¹², 8.6×10¹², 8.7×10¹², 8.8 ×10¹², 8.9×10¹², 9×10¹², 1×10¹³, 2×10¹³, 3×10¹³, 4×10¹², 5×10¹², 6.7×10¹³, 7×10¹³, 8×10¹³, 9×10¹³, 1×10¹⁴, 2×10¹⁴, 3×10¹⁴, 4×10¹⁴, 5×10¹⁴, 6×10¹⁴, 7×10¹⁴, 8×10¹⁴, 9×10¹⁴, 1×10¹⁵, 2×10¹⁵, 3×10¹⁵, 4×10¹⁵, 5×10¹⁵, 6×10¹⁵, 7×10¹⁵, 8×10¹⁵, 9×10¹⁵, or 1×10¹⁶ VG/ka.

[1014] In certain embodiments, delivery of formulated AAV particles to cells of the central nervous system (e.g., parenchyma) may comprise a total dose between about 1×10⁶ VG and about 1×10¹⁶ VG. In certain embodiments, delivery may comprise a total dose of about 1×10⁶, 2×10⁶, 3×10⁶, 4×10⁶, 5×10⁶, 6×10⁶, 7×10⁶, 8×10⁶, 9×10⁶, 1×10⁷, 2×10⁷, 3×10⁷, 4×10⁷, 5×10⁷, 6×10⁷, 7×10⁷, 8×10⁷, 9×10⁷, 1×10⁸, 2×10⁸, 3×10⁸, 4×10⁸, 5×10⁸, 6×10⁸, 7×10⁸, 8×10⁸, 9×10⁸, 1×10⁹, 2×10⁹, 3×10⁹, 4×10⁹, 5×10⁹, 6×10⁹, 7×10⁹, 8×10⁹, 9×10⁹, 1×10¹⁰, 1.9×10¹⁰, 2×10¹⁰, 3×10¹⁰, 3.73×10¹⁰, 4×10¹⁰, 5×10¹⁰, 6×10¹⁹, 7×10¹⁹, 8×10¹⁰, 9×10¹⁰, 1×10¹¹, 2×10¹¹, 2.5×10¹¹, 3×10¹¹, 4×10¹¹, 5×10¹¹, 6×10¹¹, 7×10¹¹, 8×10¹¹, 9×10¹¹, 1×10¹², 2×10¹², 3×10¹², 4×10¹², 5×10¹², 6×10¹², 7×10¹², 8×10¹², 9×10¹², 1×10¹³, 2×10¹³, 3×10¹³, 4×10¹³, 5×10¹³, 6×10¹³, 7×10¹³, 8×10¹³, 9×10¹³, 1×10¹⁴, 2×10¹⁴, 3×10¹⁴, 4×10¹⁴, 5×10¹⁴, 6×10¹⁴, 7×10¹⁴, 8×10¹⁴, 9×10¹⁴, 1×10¹⁵, 2×10¹⁵, 3×10¹⁵, 4×10¹⁵, 5×10¹⁵, 6×10¹⁵, 7×10¹⁵, 8×10¹⁵, 9×10¹⁵, or 1×10¹⁶ VG. As a non-limiting example, the total dose is 1×10¹³ VG. As another non-limiting example, the total dose is 2.1×10¹² VG.

[1015] In certain embodiments, about 10⁵ to 10⁶ viral genome (unit) may be administered per dose.

[1016] In certain embodiments, delivery of the compositions in accordance with the present disclosure to cells may comprise a total concentration between about 1×10⁶ VG/mL and about 1×10¹⁶ Vg/mL. In certain embodiments, delivery may comprise a composition concentration of about 1×10⁶, 2×10⁶, 3×10⁶, 4×10⁶, 5×10⁶, 6×10^{,} 7×10⁶, 8×10⁶, 9×10⁶, 1×10⁷, 2×10⁷, 3×10⁷, 4×10⁷, 5×10⁷, 6×10⁷, 7×10⁷, 8×10⁷, 9×10⁷, 1×10⁸, 2×10⁸, 3×10⁸, 4×10⁸, 5×10⁸, 6×10⁸, 7×10⁸, 8×10⁸, 9×10⁸, 1×10⁹, 2×10⁹, 3×10⁹, 4×10⁹, 5×10⁹, 6×10⁹, 7×10⁹, 8×10⁹, 9×10⁹, 1×10¹⁰, 2×10¹⁰, 3×10¹⁰, 4×10¹⁰, 5×10¹⁰, 6×10¹⁰, 7×10¹⁰, 8×10¹⁰, 9×10¹⁰, 1×10¹¹, 2×10¹¹, 3×10¹¹, 4×10¹¹, 5×10¹¹, 6×10¹¹, 7×10¹¹, 8×10¹¹, 9×10¹¹, 1×10¹², 1.1×10¹², 1.2×10¹², 1.3×10¹², 1.4×10¹², 1.5×10¹², 1.6×10¹², 1.7×10¹², 1.8×10¹², 1.9×10¹², 2×10¹², 2.1×10¹², 2.2×10¹², 2.3×10¹², 2.4×10¹², 2.5×10¹², 2.6×10¹², 2.7×10¹², 2.8×10¹², 2.9×10¹², 3×10¹², 3.1×10¹², 3.2×10¹², 3.3×1.0¹², 3.4×10¹², 3.5×10¹², 3.6×10¹², 3.7×10¹², 3.8×10¹², 3.9×10¹¹, 4×10¹², 4.1×10¹², 4.2×10¹², 4.3×10¹², 4.4×10¹², 4.5×10¹², 4.6×10¹², 4.7×10¹², 4.8×10¹², 4.9×10¹², 5×10¹², 6×10¹², 7×10¹², 8×10¹², 9×10¹², 1×10′'', 2×10¹³, 3×10¹³, 4×10¹³, 5×10¹³, 6×10¹³, 6.7×10¹³, 7×10¹³, 8×10¹³, 9×10¹³, 1×10¹⁴, 2×10¹⁴, 3×10¹⁴, 4×10¹⁴, 5×10¹⁴, 6×10¹⁴, 7×10¹⁴, 8×10¹⁴, 9×10¹⁴, 1×10¹⁵, 2×10¹⁵, 3×10¹⁵, 4×10¹⁵, 5×10¹⁵, 6×10¹⁵, 7×10¹⁵, 8×10¹⁵, 9×10¹⁵, or 1.×10¹⁶ VG/mL. As used herein, “VG/mL” represents vector genomes (VG) per milliliter (mL). VG/mL also may describe genome copy per milliliter or DNase resistant particle per milliliter.

[1017] In certain embodiments, delivery of the compositions in accordance with the present disclosure to cells may comprise a total concentration between about 1×10⁶ total capsid/mL and about 1×10¹⁶ total capsid/mL. In certain embodiments, delivery may comprise a composition concentration of about 1×10⁶, 2×10⁶, 3×10⁶, 4×10⁶, 5×10⁶, 6×10⁶, 7×10⁶, 8×10⁶, 9×10⁶, 1×10⁷, 2×10⁷, 3×10⁷, 4×10⁷, 5×10⁷, 6×10⁷, 7×10⁷, 8×10⁷, 9×10⁷, 1×10⁸, 2×10⁸, 3×10⁸, 4×10⁸, 5×10⁸, 6×10⁸, 7×10⁸, 8×10⁸, 9×10⁸, 1×10⁹, 2×10⁹, 3×10⁹, 4×10⁹, 5×10⁹, 6×10⁹, 7×10⁹, 8×10⁹, 9×10⁹, 1×10¹⁰, 2×10¹⁰, 3×10¹⁰, 4×10¹⁰, 5×10¹⁰, 6×10¹⁰, 7×10¹⁰, 8×10¹⁰, 9×10¹⁰, 1×10¹¹, 2×10¹¹, 3×10¹¹, 4×10¹¹, 5×10¹¹, 6×10¹¹, 7×10¹¹, 8×10¹¹, 9×10¹¹, 1×10¹², 1.1×10¹², 1.2×10¹², 1.3×10¹², 4×10¹², 15×10¹², 1.6×10¹², 1.7×10¹², 1.8×10¹², 1.9×10¹², 2×10¹², 2.1×10¹², 2.2×10¹², 2.3×10¹², 2.4×10¹², 2.5×10¹², 2.6×10¹², 2.7×10¹², 2.80×10¹², 2.9×10¹², 3×10¹², 3.1×10¹², 3.2×10¹², 3.3×10¹², 3.4×10¹², 3.5×10¹², 3.6×10¹⁷, 3.7×10¹², 3.8×10¹², 3.9×10¹², 4×10¹², 4.1×10¹², 4.2×10¹², 4.3×10¹², 4.4×10¹², 4.5×10¹², 4.6×10¹², 4.7×10¹², 4.8×10¹², 4.9×10¹², 5×10¹², 6×10¹², 7×10¹², 8×10¹², 9×10¹², 1×10¹³, 2×10¹³, 3×10¹³, 4×10¹³, 5×10¹³, 6×10¹³, 6.7×10¹³, 7×10¹³, 8×10¹³, 9×10¹³, 1×10¹⁴, 2×10¹⁴, 3×10¹⁴, 40×10¹⁴, 5×10¹⁴, 6×10¹⁴, 7×10¹⁴, 8×10¹⁴, 9×10¹⁴, 1×10¹⁵, 2×10¹⁵, 3×10¹⁵, 4×10¹⁵, 5×10¹⁵, 6×10¹⁵, 7×10¹⁵, 8×10¹⁵, 9×10¹⁵, or 1×10¹⁶ total capsid/mL.

[1018] In certain embodiments, delivery of formulated AAV particles to cells of the central nervous system (e.g., parenchyma) may comprise a composition concentration between about 1×10⁶ VG/mL and about 1×10¹⁶ VG/mL. In certain embodiments, delivery may comprise a composition concentration of about 1×10⁶, 2×10⁶, 3×10⁶, 4×10⁶, 5×10⁶, 6×10⁶, 7×10⁶, 8×10⁶, 9×10⁶, 1×10⁷, 2×10⁷, 3×10⁷, 4×10⁷, 5×10⁷, 6×10⁷, 7×10⁷, 8×10⁷, 9×10⁷, 1×10⁸, 2×10⁸, 3×10⁸, 4×10⁸, 5×10⁵, 6×10⁸, 7×10⁸, 8×10⁸, 9×10⁸, 1×10⁹, 2×10⁹, 3×10⁹, 4×10⁹, 5×10⁹, 6×10⁹, 7×10⁹, 8×10⁹, 9×10⁹, 1×10¹⁰, 2×10¹⁰, 3×10¹⁰, 4×10¹⁰, 5×10¹⁰, 6×10¹⁰, 7×10¹⁰, 8×10¹⁰, 9×10¹⁰, 1×10 ¹¹, 2×10¹¹, 3×10¹¹, 4×10¹¹, 5×10¹¹, 6×10¹¹, 7×10¹¹, 8×10¹¹, 9×10¹¹, 1×10¹², 2×10¹², 3×10¹², 4×10¹², 5×10¹², 6×10¹², 7×10¹², 8×10¹², 9×10¹⁰, 1×10¹³, 2×10¹³, 3×10¹³, 4×10¹³, 5×10¹³, 6×10¹³, 7×10¹³, 8×10¹³, 9×10¹³, 1×10¹⁴, 2×10¹⁴, 3×10¹⁴, 4×10¹⁴, 5×10¹⁴, 6×10¹⁴, 7×10¹⁴, 8×10¹⁴, 9×10¹⁴, 10×10¹⁵, 2×10¹⁵, 3×10¹⁵, 4×10¹⁵, 5×10¹⁵, 6×10¹⁵, 7×10¹⁵, 8×10¹⁵, 9×10¹⁵, or 1×10¹⁶ VG/mL. In certain embodiments, the delivery comprises a composition concentration of 1×10¹³ VG/mL. In certain embodiments, the delivery comprises a composition concentration of 2.1×10¹² VG/mL,

[1019] The desired dosage of the formulated AAV particles of the present disclosure may be delivered only once, three times a day, two times a day, once a day or more than once in a single administration protocol. In certain embodiments, the desired dosage may be delivered using multiple administrations (e.g., two, three, four, five, six, seven, eight, nine, ten, eleven, twelve, thirteen, fourteen, or more administrations). When multiple administrations are employed, split dosing regimens such as those described herein may be used. As used herein, a “split dose” is the division of “single unit dose” or total daily dose into two or more doses, e.g., two or more administrations of the “single unit dose”. As used herein, a “single unit dose” is a dose of any therapeutic administered in one dose/at one time/single route/single point of contact, i.e., single administration event.

[1020] The desired dosage of the formulated AAV particles of the present disclosure may be administered as a “pulse dose” or as a “continuous flow”. As used herein, a “pulse dose” is a series of single unit doses of any therapeutic administered with a set frequency over a period of time. As used herein, a “continuous flow” is a dose of therapeutic administered continuously for a period of time in a single route/single point of contact, i.e., continuous administration event. A total daily dose, an amount given or prescribed in 24-hour period, may be administered by any of these methods, or as a combination of these methods, or by any other methods suitable for a pharmaceutical. administration.

[1021] In certain embodiments, delivery of the formulated AAV particles of the present disclosure to a subject provides regulating activity of a gene of interest in a subject. The regulating activity may be an increase in the production of a gene of interest in a subject or the decrease of the production of a gene of interest in a subject. The regulating activity can be for at least 1 month, 2 months, 3 months, 4 months, 5 months, 6 months, 7 months, 8 months, 9 months, 10 months, 11 months, 1 year, 13 months, 14 months, 15 months, 16 months, 17 months, 18 months, 19 months, 20 months, 20 months, 21 months, 22 months, 23 months, 2 years, 3 years, 4 years, 5 years, 6 years, 7 years, 8 years, 9 years, 10 years or more than 10 years.

[1022] In certain embodiments, the formulated AAV particle of the present disclosure may be administered to a subject using a single dose, one-time treatment. The dose of the one-time treatment may be administered by any methods known in the art and/or described herein. As used herein, a “one-time treatment” refers to a composition which is only administered one time. if needed, a booster dose may be administered to the subject to ensure the appropriate efficacy is reached. A booster may be administered 1 month, 2 months, 3 months, 4 months, 5 months, 6 months, 7 months, 8 months, 9 months, 10 months. 11 months, 12 months, 1 year, 13 months, 14 months, 15 months, 16 months, 17 months, 18 months, 19 months, 20 months, 21 months, 22 months, 23 months, 24 months, 2 years, 3 years, 4 years, 5 years, 6 years, 7 years, 8 years, 9 years, 10 years, or more than 10 years after the one-time treatment.

[1023] In certain embodiments, the AAV particle formulations of the present disclosure may be delivered to a subject via a single route of administration,

[1024] In certain embodiments, the AAV particle formulations of the present disclosure may be delivered to a subject via a multi-site route of administration. A subject may be administered at 2, 3, 4, 5 or more than 5 sites.

[1025] In certain embodiments, a subject may be administered the AAV particle formulations of the present disclosure using a bolus infusion.

[1026] In certain embodiments, a subject may be administered the AAV particle formulations of the present disclosure using sustained delivery over a period of minutes, hours or days. The infusion rate may be changed depending on the subject, distribution, formulation or another delivery parameter.

[1027] In certain embodiments, the AAV particle described herein is administered via putamen and caudate infusion. As a non-limiting example, the dual infusion provides a broad striatal distribution as well as a frontal and temporal cortical distribution.

[1028] In certain embodiments, the selection of subjects for administration of the AAV particle described herein and/or the effectiveness of the dose, route of administration and/or volume of administration may be evaluated using imaging of the perivascular spaces (PVS) which are also known as Virchow-Robin spaces. PVS surround the arterioles and venules as they perforate brain parenchyma and are filled with cerebrospinal fluid (CSF)linterstitial fluid. PVS are common in the midbrain, basal ganglia, and centnim semiovale. While not wishing to be bound by theory, PVS may play a role in the normal clearance of metabolites and have been associated with worse cognition and several disease states comprising Parkinson's disease. PVS are usually are normal in size but they can increase in size in a number of disease states. Potter et al. (Cerehrovasc Dis. 2015 January; 39(4): 224-231; the contents of which are herein incorporated by reference in its entirety) developed a grading method where they studied a frill range of PVS and rated basal ganglia, centrum semiovale and midbrain PVS. They used the frequency and range of PVS used by Mac and Luilich et al. (J Neurol Neurosurg Psychiatry. 2004 November;75(11):1519-23; the contents of which are herein incorporated by reference in its entirety) and Potter et al. gave 5 ratings to basal ganglia and centrum semiovale PVS: 0 (none), 1 (1-10), 2 (11-20), 3 (21-40) and 4 (>40) and 2 ratings to midbrain PVS: 0 (non-visible) or 1 (visible). The user guide for the rating system by Potter et al. can be found at: www.shirc.ed.ac.uk/documents/epvs-rating-scale-user-guide.pdf

### Combinations

[1029] In certain embodiments, the AAV particle formulations of the present disclosure may be used in combination with one or more other therapeutic, prophylactic, research or diagnostic agents. By “in combination with,” it is not intended to imply that the agents must be administered at the same time and/or formulated for delivery together, although these methods of delivery are within the scope of the present disclosure. Compositions can be administered concurrently with, prior to, or subsequent to, one or more other desired therapeutics or medical procedures. In general, each agent will be administered at a dose and/or on a time schedule determined for that agent. in certain embodiments, the present disclosure encompasses the delivery of pharmaceutical, prophylactic, research, or diagnostic compositions in combination with agents that may improve their bioavailability, reduce and/or modify their metabolism, inhibit their excretion, and/or modify their distribution within the body.

[1030] Therapeutic agents that may he used in combination with the formulated AAV particles of the present disclosure can be small molecule compounds which are antioxidants, anti-inflammatory agents, anti-apoptosis agents, calcium regulators, antiglutamatergic agents, structural protein inhibitors, compounds involved in muscle function, and compounds involved in metal ion regulation.

[1031] In certain embodiments, compounds tested for treating disease which may be used in combination with the formulated. AAV particles described herein comprise, but are not limited to, cholinesterase inhibitors (donepezil, rivastigmine, galantamine), NMDA receptor antagonists such as memantine, anti-psychotics, anti-depressants, anti-convulsants (e.g., sodium valproate and levetiracetam for myoclonus), secretase inhibitors, amyloid aggregation inhibitors, copper or zinc modulators, BACE inhibitors, such as Methylene blue, phenothiazines, anthraquinones, n-phenylamines or rhodamines, microtubule stabilizers such as NAP, taxol or paclitaxel, kinase or phosphatase inhibitors such as those targeting GSK3β (lithium) or PP2A, immunization with Aβ peptides or dopamine-depleting agents e.g., tetrabenazine for chorea), benzodiazepines (e.g., clonazepam thr myoclonus, chorea, dystonia, rigidity, and/or spasticity), amino acid precursors of dopamine (e.g., levodopa for rigidity), skeletal muscle relaxants (e.g., baclofen, tizanidine for rigidity and/or spasticity), inhibitors for acetycholine release at the neuromuscular junction to cause muscle paralysis (e.g., botulinum toxin for bruxism and/or dystonia), atypical neuroleptics (e.g., olanzapine and quetiapine for psychosis and/or irritability, risperidone, sulpiride and haloperidol for psychosis, chorea and/or irritability, clozapine for treatment-resistant psychosis, aripiprazole thr psychosis with prominent negative symptoms), selective serotonin reuptake inhibitors (SSRIs) (e.g., citalopram, fluoxetine, paroxetine, sertraline, mirtazapine, venlafaxine for depression, anxiety, obsessive compulsive behavior and/or irritability), hypnotics (e.g., zopiclone and/or zolpidem for altered sleep-wake cycle), anticonvulsants (e.g., sodium valproate and carbamazepine for mania or hypomania) and mood stabilizers (e.g., lithium for mania or hypomania).

[1032] In certain embodiments, neurotrophic factors may be used in combination therapy with the formulated AAV particles of the present disclosure. Generally, a neurotrophic factor is defined as a substance that promotes survival, growth, differentiation, proliferation and/or maturation of a neuron, or stimulates increased activity of a neuron. In certain embodiments, the present methods further comprise delivery of one or more trophic factors into the subject in need of treatment. Trophic factors may comprise, but are not limited to, IGF-I, GDNF, BDNF, CTNF, VEGF, Colivelin, Xaliproden, Thyrotrophin-releasing hormone and ADNF, and variants thereof

[1033] In one aspect, the formulated AAV particle described herein may be co-administered with AAV particles (whether or not formulated) expressing neurotrophic factors such as AAV-IGF-I (See e.g., Vincent et al., Neuromolecular medicine, 2004, 6, 79-85; the content of which is incorporated herein by reference in its entirety) and AAV-GDNF (See e.g., Wang et al., J. Neurosci., 2002, 22, 6920-6928; the content of which is incorporated herein by reference in its entirety).

### Measurement and Analysis

[1034] Expression of payloads or the downregulating effect of such payloads from viral genomes may be determined using various methods known in the art such as, but not limited to immunochemistry (e.g., II-IC), in situ hybridization (ISM, enzyme-linked immunosorbent assay (ELISA), affinity ELISA, ELISPOT, flow cytometry, immunocytology, surface plasmon resonance analysis, kinetic exclusion assay, liquid chromatography-mass spectrometry (LCMS), high-performance liquid chromatography (HPLC), BCA assay, immunoelectrophoresis, Western blot, SDS-PAGE, protein immunoprecipitation, and/or PCR.

### Bioavailability

[1035] In certain embodiments, AAV particles formulated into a composition with a delivery agent as described herein can exhibit an increase in bioavailability as compared to a composition lacking a delivery agent as described herein. As used herein, the term “bioavailability” refers to the systemic availability of a given amount of AAV particle or expressed payload administered to a mammal. Bioavailability can be assessed by measuring the area under the curve (AUC) or the maximum serum or plasma concentration (Cₘₐₓ) of the composition following. AUC is a determination of the area under the curve plotting the serum or plasma concentration of a compound (e.g., AAV particles or expressed payloads) along the ordinate (Y-axis) against time along the abscissa (X-axis). Generally, the AUC for a particular compound can be calculated using methods known to those of ordinary skill in the art and as described in G. S. Banker, Modern Pharmaceutics, Drugs and the Pharmaceutical Sciences, v. 72, Marcel Dekker, New York, Inc., 1996, the contents of which are herein incorporated by reference in its entirety.

[1036] The Cₘₐₓ value is the maximum concentration of the AAV particle or expressed payload achieved in the serum or plasma of a mammal following administration of the AAV particle to the mammal. The Cₘₐₓ value of can be measured using methods known to those of ordinary skill in the art. The phrases “increasing bioavailability” or “improving the pharmacokinetics,” as used herein mean that the systemic availability of a first AAV particle or expressed payload, measured as AUC, Cₘₐₓ, or Cₘᵢₙ in a mammal is greater, when co-administered with a delivery agent as described herein, than when such co-administration does not take place. In certain embodiments, the bioavailability can increase by at least about 2%, at least about 5%, at least about 10%, at least about 15%, at least about 20%, at least about 25%, at least about 30%, at least about 35%, at least about 40%, at least about 45%, at least about 50%, at least about 55%, at least about 60%, at least about 65%, at least about 70%, at least about 75%, at least about 80%, at least about 85%, at least about 90%, at least about 95%, or about 100%.

### Therapeutic Window

[1037] As used herein “therapeutic window” refers to the range of plasma concentrations, or the range of levels of therapeutically active substance at the site of action, with a high probability of eliciting a therapeutic effect. In certain embodiments, the therapeutic window of the AAV particle formulations as described herein can increase by at least about 2%, at least about 5%, at least about 10%, at least about 15%, at least about 20%, at least about 25%, at least about 30%, at least about 35%, at least about 40%, at least about 45%, at least about 50%, at least about 55%, at least about 60%, at least about 65%, at least about 70%, at least about 75%, at least about 80%, at least about 85%, at least about 90%, at least about 95%, or about 100%.

### Volume of Distribution

[1038] As used herein, he term “volume of distribution”refers to the fluid volume that would be required to contain the total amount of the drug in the body at the same concentration as in the blood or plasma: Vdist equals the amount of drug in the body/concentration of drug in blood or plasma. For example, for a 10 mg dose and a plasma concentration of 10 mg/L, the volume of distribution would be 1 liter. The volume of distribution reflects the extent to which the drug is present in the extravascular tissue. A large volume of distribution reflects the tendency of a compound to bind to the tissue components compared with plasma protein binding. In a clinical setting, Vdist can be used to determine a loading dose to achieve a steady state concentration. In certain embodiments, the volume of distribution of the AAV particle formulations as described herein can decrease at least about 2%, at least about 5%, at least about 10%, at least about 15%, at least about 20%, at least about 25%, at least about 30%, at least about 35%, at least about 40%, at least about 45%, at least about 50%, at least about 55%, at least about 60%, at least about 65%, at least about 70%.

### Biologic Effect

[1039] In certain embodiments, the biological effect of the AAV particle formulations delivered to the animals may be categorized by analyzing the payload expression in the animals. The payload expression may be determined from analyzing a biological sample collected from a mammal administered the AAV particle formulations of the present disclosure. For example, a protein expression of 50-200 pg/ml for the protein encoded by the AAV particles delivered to the mammal may be seen as a therapeutically effective amount of protein in the mammal.

### V. Treatments

### General

[1040] The present disclosure provides a method for treating a disease, disorder and/or condition in a mammalian subject, comprising a human subject, comprising administering to the subject any of the viral particles or formulations described herein or administering to the subject any of the described compositions, comprising pharmaceutical compositions or formulations, described herein.

[1041] In certain embodiments, administration of the formulated AAV particles to a subject with not change the course of the underlying disease but will ameliorate symptoms in a subject.

[1042] In certain embodiments, the viral particles of the present disclosure are administered to a subject prophylactically.

[1043] In certain embodiments, the viral particles of the present disclosure are administered to a subject having at least one of the diseases described herein.

[1044] In certain embodiments, the viral particles of the present disclosure are administered to a subject to treat a disease or disorder described herein. The subject may have the disease or disorder or may be at-risk to developing the disease or disorder.

[1045] The present disclosure provides a method for administering to a subject in need thereof, comprising a human subject, a therapeutically effective amount of the AAV particles of the present disclosure to slow, stop or reverse disease progression. As a non-limiting example, disease progression may be measured by tests or diagnostic tool(s) known to those skilled in the art. As another non-limiting example, disease progression may be measured by change in the pathological features of the brain, CSF or other tissues of the subject.

[1046] In certain embodiments, various non-infectious diseases, comprising neurological diseases, may be treated with pharmaceutical compositions of the present disclosure. AAV particles, especially blood brain barrier crossing AAV particles of the present disclosure, are particularly useful in treating various neurological diseases. As a non-limiting example, the neurological disease may be Absence of the Septum Pellucidum, Acid Lipase Disease, Acid Maltase Deficiency, Acquired Epileptiform Aphasia, Acute Disseminated Encephalomyelitis, Attention Deficit-Hyperactivity Disorder (ADHD), Adie's Pupil, Adie's Syndrome, Adrenoleukodystrophy, Agenesis of the Corpus Callosum, Agnosia, Aicardi Syndrome, Aicardi-Goutieres Syndrome Disorder, AIDS—Neurological Complications, Alexander Disease, Alpers' Disease, Alternating Hemiplegia, Alzheimer's Disease, Amyotrophic Lateral Sclerosis (ALS), Anencephaly, Aneurysm, Angelman Syndrome, Angiomatosis, Anoxia, Antiphospholipid Syndrome, Aphasia, Apraxia, Arachnoid Cysts, Arachnoiditis, Arnold-Chiari Malformation, Arteriovenous Malfortrtation, Asperger Syndrome, Ataxia, Ataxia Telangiectasia, Ataxias and Cerebellar or Spinocerebellar Degeneration, Atrial Fibrillation and Stroke, Attention Deficit-Flyperactivity Disorder, Autism Spectrum Disorder, Autonomic Dysfunction, Back Pain, Barth Syndrome, Batten Disease, Becker's Myotonia, Behcet's Disease, Bell's Palsy, Benign Essential Blepharospasm, Benign Focal Amyotrophy, Benign Intracranial Hypertension, Bernhardt-Roth Syndrome, Binswanger's Disease, Blepharospasm, Bloch-Sulzberger Syndrome, Brachial Plexus Birth Injuries, Brachial Plexus Injuries, Bradbury-Eggleston Syndrome, Brain and Spinal Tumors, Brain Aneurysm, Brain Injury, Brown-Sequard Syndrome, Bulbospinal Muscular Atrophy, Cerebral Autosomal Dominant Arteriopathy with Sub-cortical Infarcts and Leukoencephalopathy (CADASIL), Canavan Disease, Carpal Tunnel Syndrome, Causalgia, Cavernomas, Cavernous Angioma, Cavernous Malformation, Central Cervical Cord Syndrome, Central Cord Syndrome, Central Pain Syndrome, Central Pontine Myelinolysis, Cephalic Disorders, Ceramidase Deficiency, Cerebellar Degeneration, Cerebellar Hypoplasia, Cerebral Aneurysms, Cerebral Arteriosclerosis, Cerebral Atrophy, Cerebral Beriberi, Cerebral Cavernous Malformation, Cerebral Gigantism, Cerebral Hypoxia, Cerebral Palsy, Cerebro-Oculo-Facio-Skeletal Syndrome (COFS), Charcot-Marie-Tooth Disease, Chiari Malformation, Cholesterol Ester Storage Disease, Chorea, Choreoacanthocytosis, Chronic Inflammatory Demyelinating Polyneuropathy (CIDP), Chronic Orthostatic Intolerance, Chronic Pain, Cockavne Syndrome Type II, Coffin Lowry Syndrome, Colpocephaly, Coma, Complex Regional Pain Syndrome, Congenital Facial Diplegia, Congenital Myasthertia, Congenital Myopathy, Congenital Vascular Cavernous Malformations, Corticobasal Degeneration, Cranial Arteritis, Craniosynostosis, Cree encephalitis, Creutzfeldt-Jakob Disease, Cumulative Trauma Disorders, Cushing's Syndrome, Cytomegalic Inclusion Body Disease, Cytomegalovirus Infection, Dancing Eyes-Dancing Feet Syndrome, Dandy-Walker Syndrome, Dawson Disease, De Morsier's Syndrome, Dejerine-Klumpke Palsy, Detnentia, Dementia-Multi-infarct, Dementia-Semantic, Dementia-Subcortical, Dementia With Lewy Bodies, Dentate Cerebellar Ataxia, Dentatorubral Atrophy, Dermatomyositis, Developmental Dyspraxia, Devic's Syndrome, Diabetic Neuropathy, Diffuse Sclerosis, Dravet Syndrome, Dysautonomia, Dysgraphia, Dyslexia, Dysphagia, Dyspraxia, Dyssynergia Cerebellaris Myocionica, Dyssynergia Cerebellaris Progressiva, Dystonias, Early Infantile Epileptic Encephalopathy, Empty Sella Syndrome, Encephalitis, Encephalitis Lethargica, Encephaloceles, Encephalopathy, Encephalopathy infantile), Encephalotrigeminal Angiomatosis, Epilepsy, Epileptic Hemiplegia, Erb's Palsy, Erb-Duchenne and Dejerine-Klumpke Palsies, Essential Tremor, Extrapontine Myelinolysis, Fabry Disease, Fahr's Syndrome, Fainting, Familial Dysautonomia, Familial Hemangioma, Familial Idiopathic Basal Ganglia Calcification, Familial Periodic Paralyses, Familial Spastic Paralysis, Farber's Disease, Febrile Seizures, Fibromuscular Dysplasia, Fisher Syndrome, Floppy Infant Syndrome, Foot Drop, Friedreich's Ataxia, Frontotemporal Dementia, Gaucher Disease, Generalized Gangliosidoses, Gersimann's Syndrome, Gerstmann-Straussler-Scheinker Disease, Giant Axonal Neuropathy, Giant Cell Arteritis, Giant Cell Inclusion Disease, Globoid Cell Leukodystrophy, Glossopharyngeal Neuralgia, Glycogen Storage Disease, Guillain-Barr- Syndrome, Hallervorden-Spatz Disease, Head Injury, Headache, Hemicrania Continua, Hemifacial Spasm, Hemiplegia Alterans, Hereditary-Neuropathies, Hereditary Spastic Paraplegia, Heredopathia Atactica Polyneuritiformis, Herpes Zoster, Herpes Zoster Oticus, Hirayama Syndrome, Holmes-Adie syndrome, Holoprosencephaly, HTLV-1 Associated Myelopathy, Hughes Syndrome, Huntington's Disease, Hydranencephaly, Hydrocephalus, Hydrocephalus-Normal Pressure, Hydromyelia, Hypercortisolism, Hypersomnia, Hypertonia, Hypotonia, Hypoxia, Immne-Mediated Encephalomyelitis, Inclusion Body Myositis, Incontinentia Pigmenti, Infantile Hypotonia, Infantile Neuroaxonal Dystrophy, Infantile Phytanic Acid Storage Disease, Infantile Refsum Disease, Infantile Spasms, Inflammatory Myopathies, Iniencephaly, Intestinal Lipodystrophy, Intracranial Cysts, Intracranial Hypertension, Isaacs' Syndrome, Joubert Syndrome, Kearns-Sayre Syndrome, Kennedy's Disease, Kinsboume syndrome, Kleine-Levin Syndrome, Klippel-Feil Syndrome, Klippel-Trenaunay Syndrome (KTS), KInver-Bucy Syndrome, Korsakoffs Amnesic Syndrome, Krabbe Disease, Kugelberg-Welander Disease, Kum, Lambert-Eaton Myasthenic Syndrome, Landau-Kleffner Syndrome, Lateral Femoral Cutaneous Nellie Entrapment, Lateral Medullary Syndrome, Learning Disabilities, Leigh's Disease, Lennox-Gastaut Syndrome, Lesch-Nyhan Syndrome, Leukodystrophy, Levine-Critchley Syndrome, Lewy Body Dementia, Lipid Storage Diseases, Lipoid Proteinosis, Lissencephaly, Locked-In Syndrome, Lou Gehrig's Disease, Lupus—Neurological Sequelae, Lyme Disease-Neurological Complications, Machado-Joseph Disease, Macrencephaly, Megalencephaly, Melkersson-Rosenthal Syndrome, Meningitis, Meningitis and Encephalitis, Menkes Disease, Meralgia. Paresthetica, Metachromatic Leukodystrophy, Microcephaly, Migraine, Miller Fisher Syndrome, Mini Stroke, Mitochondrial Myopathy, Moebius Syndrome, Monomelic Amyotrophy, Motor Neuron Diseases, Moyamoya Disease, Mucolipidoses, Mucopolysaccharidoses, Multi-Infarct Dementia, Multifocal Motor Neuropathy, Multiple Sclerosis, Multiple System Atrophy, Multiple System Atrophy with Orthostatic Hypotension., Muscular Dystrophy, Myasthenia-Congenital, Myasthenia. Gravis, Myelinoclastic Diffuse Sclerosis, Myoclonic Encephalopathy of Infants, Myoclonus, Myopathy, Myopathy-Congenital, Myopathy-Thyrotoxic, Myotonia, Myotonia Congenita, Narcolepsy, Neuroacanthocytosis, Neurodegeneration with Brain Iron Accumulation, Neurofibromatosis, Neuroleptic Malignant Syndrome, Neurological Complications of AIDS, Neurological Complications of Lyme Disease, Neurological Consequences of Cytomegalovirus Infection, Neurological Manifestations of Pompe Disease, Neurological Sequelae Of Lupus, Neuromyelitis Optica, Neuromyotortia, Neuronal Ceroid Lipofuscinosis, Neuronal Migration Disorders, Neuropathy- Hereditary, Neurosarcoidosis, Neurosyphilis, Neurotoxicity, Nevus Cavemosus, Niemann-Pick Disease, O'Sullivan-McLeod Syndrome, Occipital Neuralgia, Ohtahara Syndrome, Olivopontocerebellar Atrophy, Opsoci.onus itilyoclonus, Orthostatic Hypotension, Overuse Syndrome. Pain -Chronic, Pantothenate Kinase-Associated Neurodegeneration, Paraneoplastic Syndromes, Paresthesia, Parkinson's Disease, Paroxysmal Choreoathetosis, Paroxysmal Hemicrania, Parry-omberg, Pelizaeus-Merzbacher Disease, Pena Shokeir II Syndrome, Perineural Cysts, Periodic Paralyses, Peripheral Neuropathy, Periventricular Leukomalacia, Persistent Vegetative State, Pervasive Developmental Disorders, Phytanic Acid Storage Disease, Pick's Disease, Pinched Nerve, Piriformis Syndrome, Pituitary Tumors, Polymyositis, Pompe Disease, Porencephaly, Post-Polio Syndrome, Postherpetic Neuralgia, Postinfectious Encephalomyelitis, Postural Hypotension, Postural Orthostatic Tachycardia Syndrome, Postural Tachycardia Syndrome, Primary Dentatum Atrophy, Primary Lateral Sclerosis, Primary Progressive Aphasia, Prion Diseases, Progressive Hemifacial Atrophy, Progressive Locomotor Ataxia, Progressive Multifocal Leukoencephalopathy, Progressive Sclerosing Poliodystrophy, Progressive Supranuclear Palsy, Prosopagnosia, Pseudo-Torch syndrome, Pseudotoxoplasmosis syndrome, Pseudotumor Cerebri, Psychogenic Movement, Ramsay Hunt Syndrome I, Ramsay Hunt Syndrome II, Rasmussen's Encephalitis, Reflex Sympathetic Dystrophy Syndrome, Refsum Disease, Refsum Disease-Infantile, Repetitive Motion Disorders, Repetitive Stress Injuries, Restless Legs Syndrome, Retrovirus-Associated Myelopathy, Rett Syndrome, Reye's Syndrome, Rheumatic Encephalitis, Riley-Day Syndrome, Sacral Nerve Root Cysts, Saint Vitus Dance, Salivary Gland Disease, Sandhoff Disease, Schilder's Disease, Schizencephaly, Seitelberger Disease, Seizure Disorder, Semantic Dementia, Septo-Optic Dysplasia, Severe Myoclonic Epilepsy of Infancy (SMEI), Shaken Baby Syndrome, Shingles, Shy-Drager Syndrome, Sjögren's Syndrome, Sleep Apnea, Sleeping Sickness, Sotos Syndrome, Spasticity, Spina Bifida, Spinal Cord Infarction, Spinal Cord Injury, Spinal Cord Tumors, Spinal Muscular Atrophy, Spinocerebellar Atrophy, Spinocerebellar Degeneration, Steele-Richardson-Olszewski Syndrome, Stiff-Person Syndrome, Striatonigral Degeneration, Stroke, Sturge-Weber Syndrome, Subacute Sclerosing Panencephalitis, Subcortical Arteriosclerotic Encephalopathy, Short-lasting, Unilateral, Neuralgifortn (SUNCT) Headache, Swallowing Disorders, Sydenham Chorea, Syncope, Syphilitic Spinal Sclerosis, Syringohydromyelia, Syringomyelia, Systemic Lupus Erythematosus, Tabes Dorsalis, Tardive Dyskinesia, Tarlov Cysts, Tay-Sachs Disease, Temporal Arteritis, Tethered Spinal Cord Syndrome, Thomsen's Myotonia, Thoracic Outlet Syndrome, Thyrotoxic Myopathy, Tic Douloureux, Todd's Paralysis, Tourette Syndrome, Transient Ischemic Attack, Transmissible Spongiform Encephalopathies, Transverse Myelitis, Traumatic Brain injury, Tremor, Trigeminal Neuralgia, Tropical Spastic Paraparesis, Troyer Syndrome, Tuberous Sclerosis, Vascular Erectile Tumor, Vasculitis Syndromes of the Central and Peripheral Nervous Systems, Von Economo's Disease, Von Hippel-Lindau Disease (VHL), Von Recklinghausen's Disease, Wallenberg's Syndrome, Werdnig-Hoffman Disease, Wernicke-Korsakoff Syndrome, West Syndrome, Whiplash, Whipple's Disease, Williams Syndrome, Wilson Disease, Wolman's Disease, X-Linked Spinal and Bulbar Muscular Atrophy.

[1047] The present disclosure additionally provides a method for treating neurological disorders in a mammalian subject, comprising a human subject, comprising administering to the subject any of the AAV particles or pharmaceutical compositions of the present disclosure, In certain embodiments, the AAV particle is a blood brain barrier crossing particle. In certain embodiments, neurological disorders treated according to the methods described herein comprise, but are not limited to Amyotrophic lateral sclerosis (ALS), Huntington's Disease (HD), Parkinson's Disease (PD), and/or Friedreich's Ataxia (FA).

### Kits and Devices

### Kits

[1048] In some embodiments, the disclosure provides a variety of kits for conveniently and/or effectively carrying out methods of the present disclosure. Typically, kits will comprise sufficient amounts and/or numbers of components to allow a user to perform multiple treatments of a subject(s) and/or to perform multiple experiments.

[1049] Any of the AAV particles of the present disclosure may be comprised in a kit. In some embodiments, kits may further comprise reagents and/or instructions for creating and/or synthesizing compounds and/or compositions of the present disclosure. In some embodiments, kits may also comprise one or more buffers. In some embodiments, kits of the disclosure may comprise components for making protein or nucleic acid arrays or libraries and thus, may comprise, for example, solid supports.

[1050] In some embodiments, kit components may be packaged either in aqueous media or in lyophilized form. The container means of the kits will generally comprise at least one vial, test tube, flask, bottle, syringe or other container means, into which a component may be placed, and preferably, suitably aliquoted. Where there is more than one kit component, (labeling reagent and label may be packaged together), kits may also generally contain second, third or other additional containers into which additional components may be separately placed. In some embodiments, kits may also comprise second container means for containing sterile, pharmaceutically acceptable buffers and/or other diluents. In some embodiments, various combinations of components may be comprised in one or more vial. Kits of the present disclosure may also typically comprise means for containing compounds and/or compositions of the present disclosure, proteins, nucleic acids, and any other reagent containers in close confinement for commercial sale. Such containers may comprise injection or blow-molded plastic containers into which desired vials are retained.

[1051] In some embodiments, kit components are provided in one and/or more liquid solutions. In some embodiments, liquid solutions are aqueous solutions, with sterile aqueous solutions being particularly preferred. In some embodiments, kit components may be provided as dried powder(s). When reagents and/or components are provided as dry powders, such powders may be reconstituted by the addition of suitable volumes of solvent. In some embodiments, it is envisioned that solvents may also be provided in another container means. In some embodiments, labeling dyes are provided as dried powders. In some embodiments, it is contemplated that 10, 20, 30, 40, 50, 60, 70, 80, 90, 100, 120, 120, 130, 140, 150, 160, 170, 180, 190, 200, 300, 400, 500, 600, 700, 800, 900, 1000 micrograms or at least or at most those amounts of dried dye are provided in kits of the disclosure. In such embodiments, dye may then be resuspended in any suitable solvent, such as DMSO.

[1052] In some embodiments, kits may comprise instructions for employing kit components as well the use of any other reagent not comprised in the kit. Instructions may comprise variations that may be implemented.

### Devices

[1053] In some embodiments, the AAV particles may delivered to a subject using a device to deliver the AAV particles and a head fixation assembly. The head fixation assembly may be, but is not limited to, any of the head fixation assemblies sold by MRI interventions. As a non-limiting example, the head fixation assembly may be any of the assemblies described in U.S. Pat. Nos. 8,099,150, 8,548,569 and 9,031,636 and International Patent Publication Nos. WO201108495 and WO2014014585, the contents of each of which are incorporated by reference in their entireties. A head fixation assembly may be used in combination with an MRI compatible drill such as, but not limited to, the MRI compatible drills described in International Patent Publication No. WO402013181008 and US Patent Publication No. US0520130325012, the contents of which are herein incorporated by reference in its entirety.

[1054] In some embodiments, the AAV particles may be delivered using a method, system and/or computer program for positioning apparatus to a target point on a subject to deliver the AAV particles. As a non-limiting example, the method, system andlor computer program may be the methods, systems and/or computer programs described in U.S. Pat. No. 8,340,743, the contents of which are herein incorporated by reference in its entirety. The method may comprise: determining a target point in the body and a reference point, wherein the target point and the reference point define a planned trajectory line (PTL) extending through each; determining a visualization plane, wherein the PTL intersects the visualization plane at a sighting point; mounting the guide device relative to the body to move with respect to the PTL, wherein the guide device does not intersect the visualization plane; determining a point of intersection (GPP) between the guide axis and the visualization plane; and aligning the GPP with the sighting point in the visualization plane.

[1055] In some embodiments, the AAV particles may be delivered to a subject using a convention-enhanced delivery device. Non-limiting examples of targeted delivery of drugs using convection are described in US Patent Publication Nos. US20100217228, US20130035574 and US20130035660 and International Patent Publication No. WO2013019830 and WO2008144585, the contents of each of which are herein incorporated by reference in their entireties.

[1056] In some embodiments, a subject may be imaged prior to, during and/or after delivery of the AAV particles. The imaging method may be a method known in the art andlor described herein, such as but not limited to, magnetic resonance imaging (MRI). As a non-limiting example, imaging may be used to assess therapeutic effect. As another non-limiting example, imaging may be used for assisted delivery of AAV particles, 11.0591 In some embodiments, the AAV particles may be delivered using an MRI-guided device. Non-limiting examples of MRI-guided devices are described in U.S. Pat. Nos. 9,055,884, 9,042,958, 8,886,288, 8,768,433, 8,396,532, 8,369,930, 8,374,677 and 8,175,677 and US Patent Application No. US20140024927 the contents of each of which are herein incorporated by reference in their entireties. As a non-limiting example, the MM-guided device may be able to provide data in real time such as those described in US Patent Nos. 8,886,288 and 8,768,433, the contents of each of which is herein incorporated by reference in its entirety. As another non-limiting example, the MRI-guided device or system may be used with a targeting cannula such as the systems described in U.S. Pat. Nos. 8,175,677 and 8,374,677, the contents of each of which are herein incorporated by reference in their entireties. As yet another non-limiting example, the MRI-guided device comprises a. trajectory guide frame for guiding an interventional device as described, for example, in U.S. Pat. No. 9,055,884 and US Patent Application No. US20140024927, the contents of each of which are herein incorporated by reference in their entireties.

[1057] In some embodiments, the AAV particles may be delivered using an MRI-compatible tip assembly. Non-limiting examples of MRI-compatible tip assemblies are described in US Patent Publication No. US20140275980, the contents of which is herein incorporated by reference in its entirety.

[1058] In some embodiments, the AAV particles may be delivered using a cannula which is MM-compatible. Non-limiting examples of MM-compatible cannulas comprise those taught in International Patent Publication No. WO2011130107, the contents of which are herein incorporated by reference in its entirety. In some embodiments, the cannula or a portion thereof or the tubing associated with the cannula is attached, mounted, glued, affixed or otherwise makes reversible contact with the tissue surrounding the surgical site/field. Such contact may be localized andlor stabilized in one position during all or a portion of the procedure.

[1059] In some embodiments, the AAV particles may be delivered using a catheter which is MRI-compatible. Non-limiting examples of MRI-compatible catheters comprise those taught in International Patent Publication No. WO2012116265, US Patent Publication No. 8,825,133 and US Patent Publication No. US20140024909, the contents of each of which are herein incorporated by reference in their entireties.

[1060] In some embodiments, the AAV particles may be delivered using a device with an elongated tubular body and a diaphragm as described in US Patent Publication Nos. US20140276582 and US20140276614, the contents of each of which are herein incorporated by reference in their entireties.

[1061] In some embodiments, the AAV particles may be delivered using an MRI compatible localization and/or guidance system such as, but not limited to, those described in US Patent Publication Nos. U.S. Pat. No. 20150223905 and U.S. Pat. No. 20150230871, the contents of each of which are herein incorporated by reference in their entireties. As a non-limiting example, the MRI compatible localization and/or guidance systems may comprise a mount adapted for fixation to a patient, a targeting cannula with a lumen configured to attach to the mount so as to be able to controllably translate in at least three dimensions, and an elongate probe configured to snugly advance via slide and retract in the targeting cannula lumen, the elongate probe comprising at least one of a stimulation or recording electrode.

[1062] In some embodiments, the AAV particles may he delivered to a subject using a trajectory frame as described in US Patent Publication Nos. US20150031982 and US20140066750 and International Patent Publication Nos. WO2015057807 and WO2014039481, the contents of each of which are herein incorporated by reference in their entireties.

[1063] In some embodiments, the AAV particles may be delivered to a subject using a gene gun.

### Use of AAV Particles Encoding Protein Payloads

[1064] Provided in the present disclosure are methods for introducing into cells the AAV particles manufactured according to the methods and systems of the present disclosure, the methods comprising introducing into said cells any of the vectors in an amount sufficient for an increase in the production of target mRNA and protein to occur. In some aspects, the cells may be muscle cells, stem cells, neurons such as but not limited to, motor, hippocampal, entorhinal, thalamic or cortical neurons, and glial cells such as astrocytes or microglia.

[1065] Disclosed in the present disclosure are methods for treating neurological disease associated with insufficient function/presence of a target protein in a subject in need of treatment, The method optionally comprises administering to the subject a therapeutically effective amount of a composition comprising AAV particles of the present disclosure. As a non-limiting example, the AAV particles can increase target gene expression, increase target protein production, and thus reduce one or more symptoms of neurological disease in the subject such that the subject is therapeutically treated.

[1066] In certain embodiments, the AAV particle of the present disclosure comprising a nucleic acid encoding a protein payload comprises an AAV capsid that allows for transmission across the blood brain barrier after intravenous administration.

[1067] In certain embodiments, the composition comprising the AAV particles of the present disclosure is administered to the central nervous system of the subject via systemic administration. In certain embodiments, the systemic administration is intravenous injection.

[1068] In certain embodiments, the composition comprising the AAV particles of the present disclosure is administered to the central nervous system of the subject. In certain embodiments, the composition comprising the AAV particles of the present disclosure is administered to a tissue of a subject (e.g., brain of the subject).

[1069] In certain embodiments, the composition comprising the AAV particles of the present disclosure is administered to the central nervous system of the subject via intraparenchymal injection. Non-limiting examples of intraparenchymal injections comprise Intrathalamic, intrastriatal, intrahippocampal or targeting the entorhinal cortex.

[1070] In certain embodiments, the composition comprising the AAV particles of the present disclosure is administered to the central nervous system of the subject via intraparenchymal injection and intrathecal injection.

[1071] In certain embodiments, the AAV particles of the present disclosure may be delivered into specific types of targeted cells, comprising, but not limited to, hippocampal, cortical, motor or entorhinal neurons; glial cells comprising oligodendrocytes, astrocytes and microglia; and/or other cells surrounding neurons such as T cells.

[1072] In certain embodiments, the AAV particles of the present disclosure may be delivered to neurons in the striatum (e.g. putamen) and/or cortex.

[1073] In certain embodiments, the AAV particles of the present disclosure may be used as a therapy for neurological disease.

[1074] In certain embodiments, the AAV particles of the present disclosure may be used to increase target protein and reduce symptoms of neurological disease in a subject. The increase of target protein and/or the reduction of symptoms of neurological disease may he, independently, altered (increased for the production of target protein and reduced for the symptoms of neurological disease) by 5%, 10%, 15%, 20%, 25%, 30%, 35% 40%, 45%, 50%, 55%, 60%, 65%, 70%, 75%, 80%, 85%, 90%, 95%, or more than 95%, 5-15%, 5-20%, 5-25%, 5-30%, 5-35%, 5-40%, 5-45%, 5-50%, 5-55%, 5-60%, 5-65%, 5-70%, 5-75%, 5-80%, 5-85%, 5-90%, 5-95%, 10-20%, 10-25%, 10-30%, 10-35%, 10-40%, 10-45%, 10-50%, 10-55%, 10-60%, 10-65%, 10-70%, 10-75%, 10-80%, 10-85%, 10-90%, 10-95%, 15-25%, 15-30%, 15-35%, 15-40%, 15-45%, 15-50%, 15-55%, 15-60%, 15-65%, 15-70%, 15-75%, 15-80%, 15-85%, 15-90%, 15-95%, 20-30%, 20-35%, 20-40%, 20-45%, 20-50%, 20-55%, 20-60%, 20-65%, 20-70%, 20-75%, 20-80%, 20-85%, 20-90%, 20-95%, 25-35%, 25-40%, 25-45%, 25-50%, 25-55%, 25-60%, 25-65%, 25-70%, 25-75%, 25-80%, 25-85%, 25-90%, 25-95%, 30-40%, 30-45%, 30-50%, 30-55%, 30-60%, 30-65%, 30-70%, 30-75%, 30-80%, 30-85%, 30-90%, 30-95%, 35-45%, 35-50%, 35-55%, 35-60%, 35-65%, 35-70%, 35-75%, 35-80%, 35-85%, 35-90%, 35-95%, 40-50%, 40-55%, 40-60%, 40-65%, 40-70%, 40-75%, 40-80%, 40-85%, 40-90%, 40-95%, 45-55%, 45-60%, 45-65%, 45-70%, 45-75%, 45-80%, 45-85%, 45-90%, 45-95%, 50-60%, 50-65%, 50-70%, 50-75%, 50-80%, 50-85%, 50-90%, 50-95% 55-65%, 55-70%, 55-75%, 55-80%, 55-85%, 55-90%, 55-95%, 60-70%, 60-75%, 60-80%, 60-85%, 60-90%, 60-95%, 65-75%, 65-80%, 65-85%, 65-90%, 65-95%, 70-80%, 70-85%, 70-90%, 70-95%, 75-85%, 75-90%, 75-95%, 80-90%, 80-95%, or 90-95%.

### Use of AAV Particles Comprising RNAi Polynucleotides

[1075] Provided in the present disclosure are methods for introducing the AAV particles, comprising a nucleic acid sequence encoding the siRNA molecules of the present disclosure into cells, the method comprising introducing into said cells any of the vectors in an amount sufficient for degradation of a target mRNA to occur, thereby activating target-specific RNAi in the cells. In some aspects, the cells may be muscle cells, stem cells, neurons such as but not limited to, motor, hippocampal, entorhinal, thalamic or cortical neurons, and ghat cells such as astrocytes or microglia.

[1076] Disclosed in the present disclosure are methods for treating neurological diseases associated with dysfunction of a target protein in a subject in need of treatment. The method optionally comprises administering to the subject a therapeutically effective amount of a composition comprising AAV particles comprising a nucleic acid sequence encoding the siRNA molecules of the present disclosure. As a non-limiting example, the siRNA molecules can silence target gene expression, inhibit target protein production, and reduce one or more symptoms of neurological disease in the subject such that the subject is therapeutically treated.

[1077] In certain embodiments, the composition comprising the AAV particles of the present disclosure comprising a nucleic acid sequence encoding siRNA molecules comprise an AAV capsid that allows for transmission across the blood brain barrier after intravenous administration.

[1078] In certain embodiments, the composition comprising the AAV particles comprising a nucleic acid sequence encoding the siRNA molecules of the present disclosure is administered to the central nervous system of the subject. In certain embodiments, the composition comprising the AAV particles comprising a nucleic acid sequence encoding the siRNA molecules of the present disclosure is administered to a tissue of a subject (e.g., brain of the subject).

[1079] In certain embodiments, the composition comprising the AAV particles comprising a nucleic acid sequence encoding the siRNA molecules of the present disclosure is administered to the central nervous system of the subject via systemic administration. In certain embodiments, the systemic administration is intravenous injection.

[1080] In certain embodiments, the composition comprising the AAV particles comprising a nucleic acid sequence encoding the siRNA molecules of the present disclosure is administered to the central nervous system of the subject via intraparenchymal injection. Non-limiting examples of intraparenchymal injections comprise intrathalamic, intrastriatal, intrahippocampal or targeting the entorhinal cortex.

[1081] In certain embodiments, the composition comprising the AAV particles comprising a nucleic acid sequence encoding; the siRNA molecules of the present disclosure is administered to the central nervous system of the subject via intraparenchymal injection and intrathecal injection.

[1082] In certain embodiments, the AAV particles comprising a nucleic acid sequence encoding the siRNA molecules of the present disclosure may be delivered into specific types of targeted cells, comprising, but not limited to, hippocampal, cortical, motor or entorhinal neurons; glial cells comprising oligodendrocytes, astrocytes and microglia; and/or other cells surrounding neurons such as T cells.

[1083] In certain embodiments, the AAV particles comprising a nucleic acid sequence encoding the siRNA molecules of the present disclosure may be delivered to neurons in the striatum and/or cortex.

[1084] In certain embodiments, the AAV particles comprising a nucleic acid sequence encoding the siRNA molecules of the present disclosure may be used as a therapy for neurological disease.

[1085] In certain embodiments, the AAV particles comprising a nucleic acid sequence encoding the siRNA molecules of the present disclosure may be used as a therapy for Amyotrophic Lateral Sclerosis.

[1086] In certain embodiments, the AAV particles comprising a nucleic acid sequence encoding the siRNA molecules of the present disclosure may be used as a therapy for Huntington's Disease.

[1087] In certain embodiments, the AAV particles comprising a nucleic acid sequence encoding the siRNA molecules of the present disclosure may be used as a therapy for Parkinson's Disease.

[1088] In certain embodiments, the AAV particles comprising a nucleic acid sequence encoding the siRNA molecules of the present disclosure may be used as a therapy for Friedreich's Ataxia.

[1089] In certain embodiments, the AAV particles comprising a nucleic acid sequence encoding the siRNA molecules of the present disclosure may be used to suppress a target in order to treat neurological disease. Target protein in astrocytes may be suppressed by 5%, 10%, 15%, 20%, 25%, 30%, 35%, 40%, 45%, 50%, 55%, 60%, 65%, 70%, 75%, 80%, 85%, 90%, 95%, or more than 95%, 5-15%, 5-20%, 5-25%, 5-30%, 5-35%, 5-40%, 5-45%, 5-50%, 5-55%, 5-60%, 5-65%, 5-70%, 5-75%, 5-80%, 5-85%, 5-90%, 5-95%, 10-20%, 10-25%, 10-30%, 10-35%, 10-40%, 10-45%, 10-50%, 10-55%, 10-60%, 10-6.5%, 10-70%, 10-75%, 10-80%, 10-85%, 10-90%, 10-95%, 15-25%, 15-30%, 15-35%, 15-40%, 15-45%, 15-50%, 15-55%, 15-60%, 15-65%, 15-70%, 15-75%, 15-80%, 15-85%, 15-90%, 15-95%, 20-30%, 20-35%, 20-40%, 20-45%, 20-50%, 20-55%, 20-60%, 20-65%, 20-70%, 20-75%, 20-80%, 20-85%, 20-90%, 20-95%, 25-35%, 25-40%, 25-45%, 25-50%, 25-55%, 25-60%, 25-65%, 25-70%, 25-75%, 25-80%, 25-85%, 25-90%, 25-95%, 30-40%, 30-45%, 30-50%, 30-55%, 30-60%, 30-65%, 30-70%, 30-75%, 30-80%, 30-85%, 30-90%, 30-95%, 35-45%, 35-50%, 35-55%, 35-60%, 35-65%, 35-70%, 35-75%, 35-80%, 35-85%, 35-90%, 35-95%, 40-50%, 40-55%, 40-60%, 40-65%, 40-70%, 40-75%, 40-80%, 40-85%, 40-90%, 40-95%, 45-55%, 45-60%, 45-65%, 45-70%, 45-75%, 45-80%, 45-85%, 45-90%, 45-95%, 50-60%, 50-65%, 50-70%, 50-75%, 50-80%, 50-85%, 50-90%, 50-95%, 55-65%, 55-70%, 55-75%, 55-80%, 55-85%, 55-90%, 55-95%, 60-70%, 60-75%, 60-80%, 60-85%, 60-90%, 60-95%, 65-75%, 65-80%, 65-85%, 65-90%, 65-95%, -80%, -85%, 70-90%, 70-95%, 75-85%, 75-90%, 75-95%, 80-90%, 80-95%, or 90-95%. Target protein in astrocytes may be reduced may be 5%, 10%, 15%, 20%, 25%, 30%, 35%, 40%, 45%, 50%, 55%, 60%, 65%, 70%, 75%, 80%, 85%, 90%, 95%, or more than 95%, 5-15%, 5-20%, 5-25%, 5-30%, 5-35%, 5-40%, 5-45%, 5-50%, 5-55%, 5-60%, 5-65%, 5-70%, 5-75%, 5-80%, 5-85%, 5-90%, 5-95%, 10-20%, 10-25%, 10-30%, 10-35%, 10-40%, 10-45%, 10-50%, 10-55%, 10-60%, 10-65%, 10-70%, 10-75%, 10-80%, 10-85%, 10-90%, 10-95%, 15-25%, 15-30%, 15-35%, 15-40%, 15-45%, 15-50%, 15-55%, 15-60%, 15-65%, 15-70%, 15-75%, 15-80%, 15-85%, 15-90%, 15-95%, 20-30%, 20-35%, 20-40%, 20-45%, 20-50%, 20-55%, 20-60%, 20-65%, 20-70%, 20-75%, 20-80%, 20-85%, 20-90%, 20-95%, 25-35%, 25-40%, 25-45%, 25-50%, 25-55%, 25-60%, 25-65%, 25-70%,25-75%, 25-80%, 25-85%, 25-90%, 25-95%, 30-40%, 30-45%, 30-50%, 30-55%, 30-60%, 30-65%, 30-70%, 30-75%, 30-80%, 30-85%, 30-90%, 30-95%, 35-45%, 35-50%, 35-55%, 35-60%, 35-65%, 35-70%, 35-75%, 35-80%, 35-85%, 35-90%, 35-95%, 40-50%, 40-55%, 40-60%, 40-65%, 40-70%, 40-75%, 40-80%, 40-85%, 40-90%, 40-95%, 45-55%, 45-60%, 45-65%, 45-70%, 45-75%, 45-80%, 45-85%, 45-90%, 45-95%, 50-60%, 50-65%, 50-70%, 50-75%, 50-80%, 50-85%, 50-90%, 50-95%, 55-65%, 55-70%, 55-75%, 55-80%, 55-85%, 55-90%, 55-95%, 60-70%, 60-75%, 60-80%, 60-85%, 60-90%, 60-95%, 65-75%, 65-80%, 65-85%, 65-90%, 65-95%, 70-80%, 70-85%, 70-90%, 70-95%, 75-85%, 75-90%, 75-95%, 80-90%, 80-95%, or 90-95%.

[1090] In certain embodiments, administration of the AAV particles encoding a siRNA of the present disclosure, to a subject may lower target protein levels in a subject. The target protein levels may be lowered by about 30%, 40%, 50%, 60%, 70%, 80%, 85%, 90%, 95% and 100%, or at least 20-30%, 20-40%, 20-50%, 20-60%, 20-70%, 20-80%, 20-90%, 20-95%, 20-100%, 30-40%, 30-50%, 30-60%, 30-70%, 30-80%, 30-90%, 30-95%, 30-100%, 40-50%, 40-60%, 40-70%, 40-80%, 40-90%, 40-95%, 40-100%, 50-60%, 50-70%, 50-80%, 50-90%, 50-95%, 50-100%, 60-70%, 60-80%, 60-90%, 60-95%, 60-100%, 70-80%, 70-90%, 70-95%, 70-100%, 80-90%, 80-95%, 80-100%, 90-95%, 90-100% or 95-100% in a subject such as, but not limited to, the CNS, a region of the CNS, or a specific cell of the CNS of a subject. As a non-limiting, example, the AAV particles may lower the protein levels of a target protein by at least 50%, As a non-limiting example, the AAV particles may lower the proteins levels of a target protein by at least 40%.

### Therapeutic Indications

### Parkinson s Disease

[1091] Parkinson's Disease (PD) is a progressive disorder of the nervous system affecting especially the substantia nigra of the brain. PD develops are a result of the loss of dopamine producing brain cells. Typical early syinptoms of PD comprise shaking or trembling of a limb, e.g, hands, arms, legs, feet and face. Additional characteristic symptoms are stiffness of the limbs and torso, slow movement or an inability to move, impaired balance and coordination, cognitional changes, and psychiatric conditions e.g., depression and visual hallucinations. PD has both familial and idiopathic forms and it is suggestion to be involved with genetic and environmental causes. PD affects more than 4 million people worldwide. In the US, approximately 60,000 cases are identified annually. Generally, PD begins at the age of 50 or older. An early-onset form of the condition begins at age younger than 50, and juvenile-onset PD begins before age of 20.

[1092] Death of dopamine producing brain cells related to PD has been associated with aggregation, deposition and dysfunction of alpha-synuclein protein (see, e.g. Marques and Outeiro, 2012, Cell Death Dis. 3:e350, Jenner, 1989, J Neurol Neurosurg Psychiatry. Special Supplement, 22-28, and references therein). Studies have suggested that alpha-synuclein has a role in presynaptic signaling, membrane trafficking and regulation of dopamine release and transport. Alpha-synuclein aggregates, e,g. in forms of oligomers, have been suggested to he species responsible for neuronal dysfunction and death. Mutations of the alpha-synuclein gene (SNCA) have been identified in the familial forms of PD, but also enviromnental factors, e.g. neurotoxin affect alpha-synuclein aggregation. Other suggested causes of brain cell death in PD are dysfunction of proteosomal and lysosomal systems, reduced mitochondrial activity.

[1093] PD is related to other diseases related to alpha-synuclein aggregation, referred to as “synucleinopathies.” Such diseases comprise, but are not limited to, Parkinson's Disease Dementia (PDD), multiple system atrophy (MSA), dementia with Lewy bodies, juvenile-onset generalized neuroaxonal dystrophy (Hallervorden-Spatz disease), pure autonomic failure (PAF), neurodegeneration with brain iron accumulation type-1 (NBIA-1) and combined Alzheimer's and Parkinson's disease.

[1094] As of today, no cure or prevention therapy for PD has been identified. A variety of drug therapies available provide relief to the symptoms. Non-limiting examples of symptomatic medical treatments comprise carbidopa and levodopa combination reducing stiffness and slow movement, and anticholinergics to reduce trembling and stiffness. Other optional therapies comprise e.g. deep brain stimulation and surgery. There remains a need for therapy affecting the underlying pathophysiology. For example, antibodies targeting alpha-synuclein protein, or other proteins relevant for brain cell death in PD, may be used to prevent and/or treat PD.

[1095] In certain embodiments, methods of the present disclosure may be used to treat subjects suffering from PD and other synucleinopathies. In certain embodiments, methods of the present disclosure may be used to treat subjects suspected of developing PD and other synucleinopathies.

[1096] AAV particles, pharmaceutical formulations and methods of using the viral particles described in the present disclosure may be used to prevent, manage and/or treat PD.

### Spinal Muscular Atrophy

[1097] Spinal muscular atrophy (SMA) is a hereditary disease-causing weakness and wasting of the voluntary muscles in the arms and legs of infants and children. SMA is associated with abnormalities in the protein production of the survival motor neuron gene 1 (SMN1). Lack of the protein affects degeneration and death of lower motor neurons. Typical symptoms comprise floppy limbs and trunk, feeble movement of the arms and legs, difficulties in swallowing and eating, and impaired breathing. SMA is the most common genetic disorder leading to death of children under 2 years of age. SMA affects one in 6,000 to 10,000 people.

[1098] As of today, there is no cure for SMA. Therapies available are aimed at management of the symptoms and prevention of additional complications. Such therapies are associated e.g. with cardiology, movement management, respiratory care and mental health. There remains a need for therapy affecting the underlying pathophysiology of SMA and related diseases and ailments.

[1099] In certain embodiments, the AAV particles and methods of the present disclosure may be used to treat subjects suffering from SMA and related diseases and ailments. In certain embodiments, methods of the present disclosure may be used to treat subjects suspected of developing SMA or related diseases and ailments.

[1100] AAV particles, pharmaceutical formulations and methods of using the viral particles described in the present disclosure may be used to prevent, manage and/or treat SMA and related diseases and ailments.

### Alzheimer's Disease

[1101] Alzheimer's Disease (AD) is a debilitating neurodegenerative disease and the most common form of dementia affecting the memory, thinking and behavior. Typical early symptom is difficulty of remembering newly learned information. As the disease advances, symptoms comprise disorientation, changes in sleep, changes in mood and behavior, confusion, unfound suspicions and eventually difficulty to speak, swallow and walk. AD currently afflicts more than 35 million people worldwide, with that number expected to double in coming decades.

[1102] As of today, no cure or prevention therapy for AD has been identified. Drug therapy to treat memory loss, behavioral changes and sleep changes, and to slow down the progression of AD are available. However, these symptomatic treatments do not address the underlying pathophysiology.

[1103] In certain embodiments, methods of the present disclosure may be used to treat subjects suffering from AD and related diseases and ailments. In certain embodiments, methods of the present disclosure may be used as a therapy for to treat subjects suspected of developing AD or related diseases and ailments.

[1104] AAV particles, pharmaceutical formulations and methods of using the viral particles described in the present disclosure may be used to prevent, manage and/or treat AD and related diseases and ailments.

### Amyotrophic Lateral Sclerosis

[1105] Amyotrophic Lateral Sclerosis (ALS), also known as Lou Gehrig's disease or classical motor neuron disease, is a rapidly progressive and fatal neurological disease. ALS is associated with cell degeneration and death of the upper and lower motor neurons, leading to enablement of muscle movement, weakening, wasting and loss of control over voluntary muscle movement. Early symptoms comprise muscle weakness of hands, legs and swallowing muscles, eventually progressing to inability to breathe due to diaphragm failure. According to Centers for Disease Control and Prevention (CDC), ALS affects an estimated 12,000-15,000 individuals in the US. About 5-10% of cases are familial.

[1106] ALS, as other non-infectious neurodegenerative diseases, has been characterized by presence of misfolded proteins. Familial ALS has been associated with mutations of TAR DNA-binding protein 43 (TDP-43) and RNA-binding protein FUS/TLS. Some proteins have been identified to slow down progression of ALS, such as, but not limited, to growth factors, e.g. insulin-like growth factor 1 (IGF-1), glial cell line-derived growth factor, brain-derived growth factor, vascular endothelial growth factor and ciliary neurotrophic factor, or growth factors promoting muscle growth, e.g. myostatin.

[1107] As of today, there is no prevention or cure for ALS. FDA approved drug niluzole has been approved to prolong the life but does not have an effect on symptoms. Additionally, drugs and medical devices are available to tolerate pain and attacks associated with ALS. There remains a need for therapy affecting the underlying pathophysiology.

[1108] In certain embodiments, methods of the present disclosure may be used to treat subjects suffering from ALS and related diseases and ailments. In certain embodiments, methods of the present disclosure may be used to treat subjects suspected of developing ALS or related diseases and ailments.

[1109] AAV particles, pharmaceutical formulations and methods of using the viral particles described in the present disclosure may be used to prevent, manage and/or treat ALS and related diseases and ailments.

### Huntington's Disease

[1110] Huntington's disease (HD) is a rare, inherited disorder causing degeneration of neurons in the motor control region of the brain, as well as other areas. Typical symptoms of the disease comprise uncontrolled movements (chorea), abnormal postures, impaired coordination, slurred speech and difficulty of feeding and swallowing accompanied by changes in behavior, judgment and cognition. HD is caused by mutations in the gene associated with the huntingtin (HTT) protein. The mutation causes the (CAG) blocks of DNA to repeat abnormally many times. HD affects approximately 30,000 individuals in the US.

[1111] HD is characterized by mutations of the huntingtin (HTT) protein with abnormal expansions of polyglutamine tracts, e.g. expansion of the length of glutamine residues encoded by CAG repeats. The expansion threshold for occurrence of the disease is considered to be approximately 35-40 residues. HD is also associated with beta sheet rich aggregates in striatal neurons formed by N-terminal region of HTT. The expansions and aggregates lead to gradual loss of neurons as HD progresses. Additionally, the cell death in FED is associated with death receptor 6 (DR6) which is known to induce apoptosis.

[1112] As of today, there is no therapy to cure, or prevent the progression of the disease. Drug therapies available are aimed at management of the symptoms. For example, FDA has approved tetrabenezine to be prescribed for prevention of chorea. Additionally, e.g. antipsychotic drugs may help to control delusions, hallucinations and violent outbursts. There remains a need for therapy affecting the underlying, pathophysiology, such as antibody therapies targeting the HTT protein, DR6 protein, and/or other HD associated proteins.

[1113] In certain embodiments, methods of the present disclosure may be used to treat subjects suffering from HD and related diseases and ailments. In certain embodiments, methods of the present disclosure may he used to treat subjects suspected of developing HD or related diseases and ailments.

[1114] AAV particles, pharmaceutical formulations and methods of using the viral particles described in the present disclosure may be used to prevent, manage and/or treat HD and related diseases and ailments.

### VI. DEFINITIONS

[1115] At various places in the present disclosure, substituents or properties of compounds of the present disclosure are disclosed in groups or in ranges. It is specifically intended that the present disclosure comprise each and every individual or sub-combination of the members of such groups and ranges.

[1116] Unless stated otherwise, the following terms and phrases have the meanings described below. The definitions are not meant to be limiting in nature and serve to provide a clearer understanding of certain aspects of the present disclosure.

[1117] Adeno-associated virus: The term “adeno-associated virus” or “AAV” as used herein refers to members of the dependovirus genus comprising any particle, sequence, gene, protein, or component derived therefrom.

[1118] AAV Particle: As used herein, an “AAV particle” is a virus which comprises a capsid and a viral genome with at least one payload region and at least one ITR region. AAV particles of the present disclosure may be produced recombinantly and may be based on adeno-associated virus (AAV) parent or reference sequences. AAV particle may be derived from any serotype, described herein or known in the art, comprising combinations of serotypes (i.e., “pseudotyped” AAV) or from various genomes (e.g., single stranded or self-complementary). In addition, the AAV particle may be replication defective and/or targeted.

[1119] Activity: As used herein, the term “activity” refers to the condition in which things are happening or being done. Compositions of the present disclosure may have activity and this activity may involve one or more biological events.

[1120] Administering: As used herein, the term “administering” refers to providing a pharmaceutical agent or composition to a subject.

[1121] Administered in combination: As used herein, the term “administered in combination” or “combined administration” means that two or more agents are administered to a subject at the same time or within an interval such that there may be an overlap of an effect of each agent on the patient. In certain embodiments, they are administered within about 60, 30, 15, 10, 5, or 1 minute of one another. hi certain embodiments, the administrations of the agents are spaced sufficiently closely together such that a combinatorial (e.g., a synergistic) effect is achieved.

[1122] Amelioration: As used herein, the term “amelioration” or “ameliorating” refers to a lessening of severity of at least one indicator of a condition or disease. For example, in the context of neurodegeneration disorder, amelioration comprises the reduction of neuron loss.

[1123] Animal: As used herein, the term “animal” refers to any member of the animal kingdom. In certain embodiments, “animal” refers to humans at any stage of development. in certain embodiments, “animal” refers to non-human animals at any stage of development. In certain embodiments, the non-human animal is a mammal (e.g., a rodent, a mouse, a rat, a rabbit, a monkey, a dog, a cat, a sheep, cattle, a primate, or a pig). In certain embodiments, animals comprise, but are not limited to, mammals, birds, reptiles, amphibians, fish, and worms. In certain embodiments, the animal is a transgenic animal, genetically-engineered animal, or a clone.

[1124] Antisense strand: As used herein, the term “the antisense strand” or “the first strand” or “the guide strand” of a siRNA molecule refers to a strand that is substantially complementary to a section of about 10-50 nucleotides, e.g., about 15-30, 16-25, 18-23 or 19-22 nucleotides of the mRNA of the gene targeted for silencing. The antisense strand or first strand has sequence sufficiently complementary to the desired target mRNA sequence to direct target-specific silencing, e.g., complementarity sufficient to trigger the destruction of the desired target mRNA by the RNAi machinery or process.

[1125] Approximately: As used herein, the term “approximately” or “about,” as applied to one or more values of interest, refers to a value that is similar to a stated reference value. As used herein, the term “about” means +/−10% of the recited value. In certain embodiments, the term “approximately” refers to a ranae of values that fall within 25%, 20%, 19%, 18%, 17%, 16%, 15%, 14%, 13%, 12%, 11%, 10%, 9%, 8%, 7%, 6%, 5%, 4%, 3%, 2%, 1% or less in either direction (greater than or less than) of the stated reference value unless otherwise stated or otherwise evident from the context (except where such number would exceed 100% of a possible value).

[1126] Associated with: As used herein, the terms “associated with,” “conjugated,” “linked,” “attached,” and “tethered,” when used with respect to two or more moieties, means that the moieties are physically associated or connected with one another, either directly or via one or more additional moieties that serves as a linking agent, to form a structure that is sufficiently stable so that the moieties remain physically associated under the conditions in which the structure is used, e.g., physiological conditions. An “association” need not be strictly through direct covalent chemical bonding. It may also suggest ionic or hydrogen bonding or a hybridization-based connectivity sufficiently stable such that the “associated” entities remain physically associated.

[1127] Baculoviral expression vector (BEV): As used herein a BEV is a baculoviral expression vector, i.e., a polynucleotide vector of baculoviral origin. Systems using BEVs are known as baculoviral expression vector systems (BEVSs),

[1128] mBEV or modified BEV: As used herein, a modified BEV is an expression vector of baculoviral origin which has been altered from a starting BEV (whether wild type or artificial) by the addition and/or deletion and/or duplication and/or inversion of one or more: genes; gene fragments; cleavage sites; restriction sites; sequence regions; sequence(s) encoding a payload or gene of interest; or combinations of the foregoing.

[1129] Bifunctional: As used herein, the term “bifunctional” refers to any substance, molecule or moiety which is capable of or maintains at least two functions. The functions may affect the same outcome or a different outcome. The structure that produces the function may be the same or different.

[1130] BIIC: As used herein a BIIC is a baculoviral infected insect cell.

[1131] Biocompatible: As used herein, the term “biocompatible” means compatible with living cells, tissues, organs or systems posing little to no risk of injury, toxicity or rejection by the immune system.

[1132] Biodegradable: As used herein, the term “biodegradable” means capable of being broken down into innocuous products by the action of living things.

[1133] Biologically active: As used herein, the phrase “biologically active” refers to a characteristic of any substance that has activity in a biological system and/or organism. For instance, a substance that, when administered to an organism, has a biological effect on that organism, is considered to be biologically active. In particular embodiments, an AAV particle of the present disclosure may be considered biologically active if even a portion of the encoded payload is biologically active or mimics an activity considered biologically relevant.

[1134] Capsid: As used herein, the term “capsid” refers to the protein shell of a virus particle.

[1135] Codon optimized: As used herein, the terms “codon optimized” or “codon optimization” refers to a modified nucleic acid sequence which encodes the same amino acid sequence as a parent/reference sequence, but which has been altered such that the codons of the modified nucleic acid sequence are optimized or improved for expression in a particular system (such as a particular species or group of species). As a non-limiting example, a nucleic acid sequence which comprises an AAV capsid protein can be codon optimized for expression in insect cells or in a particular insect cell such Spodoptera frugiperda cells. Codon optimization can be completed using methods and databases known to those in the art.

[1136] Complementary and substantially complementary: As used herein, the term “complementary” refers to the ability of polynucleotides to form base pairs with one another. Base pairs are typically formed by hydrogen bonds between nucleotide units in antiparallel polynucleotide strands. Complementary polynucleotide strands can form base pair in the Watson-Crick manner (e.g., A to T, A to U, C to G), or in any other manner that allows for the formation of duplexes. As persons skilled in the art are aware, when using RNA as opposed to DNA, uracil rather than thymine is the base that is considered to be complementary to adenosine. However, when a U is denoted in the context of the present disclosure, the ability to substitute a T is implied, unless otherwise stated. Perfect complementarity or 100% complementarity refers to the situation in which each nucleotide unit of one polynucleotide strand can form hydrogen bond with a nucleotide unit of a second polynucleotide strand. Less than perfect complementarity refers to the situation in which some, but not all, nucleotide units of two strands can form hydrogen bond with each other, For example, for two 20-mers, if only two base pairs on each strand can form hydrogen bond with each other, the polynucleotide strands exhibit 10% complementarity. In the same example, if 18 base pairs on each strand can form hydrogen bonds with each other, the polynucleotide strands exhibit 90% complementarity, As used herein, the term “substantially complementary” means that the siRNA has a sequence (e.g., in the antisense strand) which is sufficient to bind the desired target mRNA, and to trigger the RNA silencing of the target mRNA.

[1137] Compound: Compounds of the present disclosure comprise all of the isotopes of the atoms occurring in the intermediate or final compounds. “Isotopes” refers to atoms having the same atomic number but different mass numbers resulting; from a different number of neutrons in the nuclei. For example, isotopes of hydrogen comprise tritium and deuterium.

[1138] The compounds and salts of the present disclosure can be prepared in combination with solvent or water molecules to form solvates and hydrates by routine methods.

[1139] Conditionally active: As used herein, the term “conditionally active” refers to a mutant or variant of a wild-type polypeptide, wherein the mutant or variant is more or less active at physiological conditions than the parent polypeptide. Further, the conditionally active polypeptide may have increased or decreased activity at aberrant conditions as compared to the parent polypeptide. A conditionally active polypeptide may be reversibly or irreversibly inactivated at normal physiological conditions or aberrant conditions.

[1140] Conserved: As used herein, the term “conserved” refers to nucleotides or amino acid residues of a polynucleotide sequence or polypeptide sequence, respectively, that are those that occur unaltered in the same position of two or more sequences being compared. Nucleotides or amino acids that are relatively conserved are those that are conserved amongst more related sequences than nucleotides or amino acids appearing elsewhere in the sequences.

[1141] In certain embodiments, two or more sequences are said to be “completely conserved” if they are 100% identical to one another. In certain embodiments, two or more sequences are said to be “highly conserved” if they are at least 70% identical, at least 80% identical, at least 90% identical, or at least 95% identical to one another. In certain embodiments, two or more sequences are said to be “highly conserved” if they are about 70% identical, about 80% identical, about 90% identical. about 95%, about 98%, or about 99% identical to one another. In certain embodiments, two or more sequences are said to be “conserved” if they are at least 30% identical, at least 40% identical, at least 50% identical, at least 60% identical, at least 70% identical, at least 80% identical, at least 90% identical, or at least 95% identical to one another. in certain embodiments, two or more sequences are said to be “conserved” if they are about 30% identical, about 40% identical, about 50% identical, about 60% identical, about 70% identical, about 80% identical, about 90% identical, about 95% identical, about 98% identical, or about 99% identical to one another. Conservation of sequence may apply to the entire length of an polynucleotide, or polypeptide or may apply to a portion, region or feature thereof.

[1142] Control Elements: As used herein, “control elements”, “regulatory control elements” or “regulatory sequences” refers to promoter regions, polyadenylation signals, transcription termination sequences, upstream regulatory domains, origins of replication, internal ribosome entry sites (“TRES”), enhancers, and the like, which provide for the replication, transcription and translation of a coding sequence in a recipient cell. Not all of these control elements need always be present as long as the selected coding sequence is capable of being replicated, transcribed and/or translated in an appropriate host cell.

[1143] Controlled Release: As used herein, the term “controlled release” refers to a pharmaceutical composition or compound release profile that conforms to a particular pattern of release to affect a therapeutic outcome.

[1144] Cytostatic: As used herein, “cytostatic” refers to inhibiting, reducing, suppressing the growth, division, or multiplication of a cell (e.g., a mammalian cell (e.g., a human cell)), bacterium, virus, fungus, protozoan, parasite, prion, or a combination thereof

[1145] Cytotoxic: As used herein, “cytotoxic” refers to killing or causing injurious, toxic, or deadly effect on a cell (e.g., a mammalian cell (e.g., a human cell)), bacterium, virus, fungus, protozoan, parasite, prion, or a combination thereof.

[1146] Delivery: As used herein, “delivery” refers to the act or manner of delivering an AAV particle, a compound, substance, entity, moiety, cargo or payload.

[1147] Delivery Agent: As used herein, “delivery agent” refers to any substance which facilitates, at least in part, the in vivo delivery of an AAV particle to targeted cells.

[1148] Destabilized: As used herein, the term “destabilize,” or “destabilizing region” means a region or molecule that is less stable than a starting, wild-type or native form of the same region or molecule.

[1149] Detectable label: As used herein, “detectable label” refers to one or more markers, signals, or moieties which are attached, incorporated or associated with another entity that is readily detected by methods known in the art comprising radiography, fluorescence, chemiluminescence, enzymatic activity, absorbance and the like. Detectable labels comprise radioisotopes, fluorophores, chromophores, enzymes, dyes, metal ions, ligands such as biotin, avidin, streptavidin and haptens, quantum dots, and the like. Detectable labels may be located at any position in the peptides or proteins disclosed herein. They may be within the amino acids, the peptides, or proteins, or located at the N- or C-termini.

[1150] Digest: As used herein, the term “digest” means to break apart into smaller pieces or components. When referring to polypeptides or proteins, digestion results in the production of peptides.

[1151] Distal: As used herein, the term “distal” means situated away from the center or away from a point or region of interest.

[1152] Dosing regimen: As used herein, a “dosing regimen” is a schedule of administration or physician determined regimen of treatment, prophylaxis, or palliative care.

[1153] Encapsulate: As used herein, the term “encapsulate” means to enclose, surround or encase.

[1154] Engineered: As used herein, embodiments of the present disclosure are “engineered” when they are designed to have a feature or property, whether structural or chemical, that varies from a starting point, wild type or native molecule.

[1155] Effective Amount: As used herein, the term “effective amount” of an agent is that amount sufficient to effect beneficial or desired results, for example, clinical results, and, as such, an “effective amount” depends upon the context in which it is being applied. For example, in the context of administering an agent that treats cancer, an effective amount of an agent is, for example, an amount sufficient to achieve treatment, as defined herein, of cancer, as compared to the response obtained without administration of the agent.

[1156] Expression: As used herein, “expression” of a nucleic acid sequence refers to one or more of the following events: (1) production of an RNA template from a DNA sequence (e.g., by transcription); (2) processing of an RNA transcript (e.g., by splicirm, editing, 5′ cap formation, and/or 3′ end processing); (3) translation of an RNA into a polypeptide or protein; and (4) post-translational modification of a polypeptide or protein.

[1157] Feature: As used herein, a “feature” refers to a characteristic, a property, or a distinctive element.

[1158] Formulation: As used herein, a “formulation” comprises at least one AAV particle and a delivery agent or excipient.

[1159] Fragment: A “fragment,” as used herein, refers to a portion. For example, fragments of proteins may comprise polypeptides obtained by digesting full-length protein isolated from cultured cells.

[1160] Functional: As used herein, a “functional” biological molecule is a biological molecule in a form in which it exhibits a property and/or activity by which it is characterized.

[1161] Gene expression: The term “gene expression” refers to the process by which a nucleic acid sequence undergoes successful transcription and in most instances translation to produce a protein or peptide. For clarity, when reference is made to measurement of “gene expression”, this should be understood to mean that measurements may he of the nucleic acid product of transcription, e.g., RNA or mRNA or of the amino acid product of translation, e.g., polypeptides or peptides. Methods of measuring the amount or levels of RNA, mRNA, polypeptides and peptides are well known in the art.

[1162] Homology: As used herein, the term “homology” refers to the overall relatedness between polymeric molecules, e.g. between polynucleotide molecules (e.g. DNA molecules and/or RNA molecules) and/or between polypeptide molecules. In certain embodiments, polymeric molecules are considered to be “homologous” to one another if their sequences are at least 25%, 30%, 35%, 40%, 45%, 50%, 55%, 60%, 65%, 70%, 75%, 80%, 85%, 90%, 95%, or 99% identical or similar. The term “homologous” necessarily refers to a comparison between at least two sequences (polynucleotide or polypeptide sequences). In accordance with the present disclosure, two polynucleotide sequences are considered to be homologous if the polypeptides they encode are at least about 50%, 60%, 70%, 80%, 90%, 95%, or even 99% for at least one stretch of at least about 20 amino acids. In certain embodiments, homologous polynucleotide sequences are characterized by the ability to encode a stretch of at least 4-5 uniquely specified amino acids. For polynucleotide sequences less than 60 nucleotides in length, homology is determined by the ability to encode a stretch of at least 4-5 uniquely specified amino acids. In accordance with the present disclosure, two protein sequences are considered to be homologous if the proteins are at least about 50%, 60%, 70%, 80%, or 90% identical for at least one stretch of at least about 20 amino acids.

[1163] Heterologous Region: As used herein the term “heterologous region” refers to a region which would not be considered a homologous region.

[1164] Homologous Region: As used herein the term “homologous region” refers to a region which is similar in position, structure, evolution origin, character, form or function.

[1165] Identity: As used herein, the term “identity” refers to the overall relatedness between polymeric molecules, e.g., between polynucleotide molecules e.g. DNA molecules and/or RNA molecules) and/or between polypeptide molecules. Calculation of the percent identity of two polynucleotide sequences, for example, can be performed by aligning the two sequences for optimal comparison purposes (e.g., gaps can be introduced in one or both of a first and a second nucleic acid sequences for optimal alignment and non-identical sequences can be disregarded for comparison purposes). In certain embodiments, the length of a sequence aligned for comparison purposes is at least 30%, at least 40%, at least 50%, at least 60%, at least 70%, at least 80%, at least 90%, at least 95%, or 100% of the length of the reference sequence. The nucleotides at corresponding nucleotide positions are then compared. When a position in the first sequence is occupied by the same nucleotide as the corresponding position in the second sequence, then the molecules are identical at that position. The percent identity between the two sequences is a function of the number of identical positions shared by the sequences, taking into account the number of gaps, and the length of each gap, which needs to be introduced for optimal alignment of the two sequences. The comparison of sequences and determination of percent identity between two sequences can be accomplished using a mathematical algorithm. For example, the percent identity between two nucleotide sequences can be determined using methods such as those described in Computational Molecular Biology, Lesk, A. M., ed., Oxford University Press, New York, 1988; Biocomputing: informatics and Genome Projects, Smith, D. ed., Academic Press, New York, 1993; Sequence Analysis in Molecular Biology, von Heinje, G., Academic Press, 1987; Computer Analysis of Sequence Data, Part I, Griffin, A. M., and Griffin, H. G., eds., Humana Press, New Jersey, 1994; and Sequence Analysis Primer, Gribskov, M. and Devereux, J., eds., M Stockton Press, New York, 1991; the contents of which are each incorporated herein by reference in their entireties, insofar as they do not conflict with the present disclosure. For example, the percent identity between two nucleotide sequences can be determined using the algorithm of Meyers and Miller (CABIOS, 1989, 4:11-17), which has been incorporated into the ALIGN program (version 2.0) using a PAM120 weight residue table, a gap length penalty of 12 and a gap penalty of 4. The percent identity between two nucleotide sequences can, alternatively, be determined using the GAP program in the GCG software package using an NWSgapdna.CMP matrix. Methods commonly employed to determine percent identity between sequences comprise, but are not limited to those disclosed in Carillo, H., and Lipman, D., SIAM J Applied Math., 48:1073 (1988); the contents of which are each incorporated herein by reference in their entireties, insofar as they does not conflict with the present disclosure. Techniques for determining identity are codified in publicly available computer programs. Exemplary computer software to determine homology between two sequences comprise, but are not limited to, GCG program package, Devereux, J., et al., Nucleic Acids Research, 12(1), 387 (1984)), BLASTP, BLASTN, and PASTA Altschul, S. F. et al., J. Molec. Biol., 215, 403 (1990)).

[1166] Inhibit expression of a gene: As used herein, the phrase “inhibit expression of a gene” means to cause a reduction in the amount of an expression product of the gene. The expression product can be an RNA. transcribed from the gene (e.g., an mRNA) or a polypeptide translated from an mRNA transcribed from the gene. Typically, a reduction in the level of an mRNA results in a reduction in the level of a polypeptide translated therefrom. The level of expression may be determined using standard techniques for measuring mRNA or protein.

[1167] In vitro: As used herein, the term “in vitro” refers to events that occur in an artificial environment, e.g., in a test tube or reaction vessel, in cell culture, in a Petri dish, etc., rather than within an organism (e.g., animal, plant, or microbe).

[1168] In vivo: As used herein, the term “in vivo” refers to events that occur within an organism (e.g., animal, plant, or microbe or cell or tissue thereof).

[1169] Isolated: As used herein, the term “isolated” refers to a substance or entity that has been separated from at least some of the components with which it was associated (whether in nature or in an experimental setting). Isolated substances may have varying levels of purity in reference to the substances from which they have been associated. Isolated substances and/or entities may be separated from at least about 10%, about 20%, about 30%, about 40%, about 50%, about 60%, about 70%, about 80%, about 90%, or more of the other components with which they were initially associated. In certain embodiments, isolated agents are more than about 80%, about 85%, about 90%, about 91%, about 92%, about 93%, about 94%, about 95%, about 96%, about 97%, about 98%, about 99%, or more than about 99% pure, As used herein, a substance is “pure” if it is substantially free of other components. As used herein, the terra “substantially isolated” is meant that a substance is substantially separated from the environment in which it was formed or detected. Partial separation can comprise, for example, a composition enriched in the substance or AAV particles of the present disclosure. Substantial separation can comprise compositions containing at least about 50%, at least about 60%, at least about 70%, at least about 80%, at least about 90%, at least about 95%, at least about 97%, or at least about 99% by weight of the compound of the present disclosure, or salt thereof. Methods for isolating compounds and their salts are routine in the art.

[1170] Linker: As used herein “linker” refers to a molecule or group of molecules which connects two molecules. A linker may be a nucleic acid sequence connecting two nucleic acid sequences encoding two different polypeptides. The linker may or may not be translated, The linker may be a cleavable linker.

[1171] MicroRNA (miRNA) binding site: As used herein, a microRNA (miRNA) binding site represents a nucleotide location or region of a nucleic acid transcript to which at least the “seed” region of a miRNA binds.

[1172] Modified: As used herein “modified” refers to a changed state or structure of a molecule of the present disclosure. Molecules may be modified in many ways comprising chemically, structurally, and functionally. As used herein, embodiments of the disclosure are “modified” when they have or possess a feature or property, whether structural or chemical, that varies from a starting point, wild type or native molecule.

[1173] Mutation: As used herein, the term “mutation” refers to any changing of the structure of a gene, resulting in a variant (also called “mutant”) form that may be transmitted to subsequent generations. Mutations in a gene may be caused by the alternation of single base in DNA, or the deletion, insertion, or rearrangement of larger sections of genes or chromosomes.

[1174] Naturally Occurring: As used herein, “naturally occurring” or “wild-type” means existing in nature without artificial aid, or involvement of the hand of man.

[1175] Non-human vertebrate: As used herein, a “non-human vertebrate” comprises all vertebrates except Homo sapiens, comprising wild and domesticated species. Examples of non-human vertebrates comprise, but are not limited to, mammals, such as alpaca, banteng, bison, camel, cat, cattle, deer, dog, donkey, gayal, goat, guinea pig, horse, llama, mule, pig, rabbit, reindeer, sheep water buffalo, and yak.

[1176] Nucleic Acid: As used herein, the term “nucleic acid”, “polynucleotide” and “oligonucleotide” refer to any nucleic acid polymers composed of either polydeoxyribonucleotides (containing 2-deoxy-D-ribose), or polyribonucleotides (containing D-ribose), or any other type of polynucleotide which is an N glycoside of a purine or pyrimidine base, or modified purine or pyrimidine bases. There is no intended distinction in length between the term “nucleic acid”, “polynucleotide” and “oligonucleotide”, and these terms will be used interchangeably. These terms refer only to the primary structure of the molecule. Thus, these terms comprise double- and single-stranded DNA, as well as double- and single stranded RNA.

[1177] Off-target: As used herein, “off target” refers to any unintended effect on any one or more taraet, gene, or cellular transcript.

[1178] Open reading frame: As used herein, “open reading frame” or “ORF” refers to a sequence which does not contain a stop codon within the given reading frame, other than at the end of the reading frame.

[1179] Operably linked: As used herein, the phrase “operably linked” refers to a functional connection between two or more molecules, constructs, transcripts, entities, moieties or the like. As a non-limiting example, a promoter is “operably linked” to a nucleotide sequence when the promoter sequence controls and/or regulates the transcription of the nucleotide sequence.

[1180] Patient: As used herein, “patient” refers to a subject who may seek or need treatment, requires treatment, is receiving treatment, will receive treatment, or a subject who is under care by a trained professional for a particular disease or condition.

[1181] Payload: As used herein, “payload” or “payload region” refers to one or more polynucleotides or polynucleotide regions encoded by or within a viral genome or an expression product of such polynucleotide or polynucleotide region, e.g., a transgene, a polynucleotide encoding a polypeptide or multi-polypeptide, or a modulatory nucleic acid or regulatory nucleic acid.

[1182] Payload construct: As used herein, “payload construct” is one or more vector construct which comprises a polynucleotide region encoding or comprising a payload that flanked on one or both sides by an inverted terminal repeat (ITR) sequence. The payload construct presents a template that is replicated in a viral production cell to produce a therapeutic viral genome.

[1183] Payload construct vector: As used herein, “payload construct vector” is a vector encoding or comprising a payload construct, and regulatory regions for replication and expression of the payload construct in bacterial cells.

[1184] Payload construct expression vector: As used herein, a “payload construct expression vector” is a vector encoding or comprising a payload construct and which further comprises one or more polynucleotide regions encoding or comprising components for viral expression in a viral replication cell.

[1185] Peptide: As used herein, “peptide” is less than or equal to 50 amino acids long, e.g., about 5, 10, 15, 20, 25, 30, 35. 40, 45, or 50 amino acids long.

[1186] Pharmaceutically acceptable: The phrase “pharmaceutically acceptable” employed herein to refer to those compounds, materials, compositions, and/or dosage forms which are, within the scope of sound medical judgment, suitable for use in contact with the tissues of human beings and animals without excessive toxicity, irritation, allergic response, or other problem or complication, commensurate with a reasonable benefit/risk ratio. 111901 Pharmaceutically acceptable excipients: The phrase “pharmaceutically acceptable excipient,” as used herein, refers any ingredient other than the compounds described herein (for example, a vehicle capable of suspending or dissolving the active compound) and having the properties of being substantially nontoxic and non-inflammatory in a patient. Excipients may comprise, for example: antiadherents, antioxidants, binders, coatings, compression aids, disintegrants, dyes (colors), emollients, emulsifiers, fillers (diluents), film formers or coatings, flavors, fragrances, glidants (flow enhancers), lubricants, preservatives, printing inks, sorbents, suspending or dispersing agents, sweeteners, and waters of hydration. Exemplary excipients comprise, but are not limited to: butylated hydroxytoluene (BHT), calcium carbonate, calcium phosphate (dibasic), calcium stearate, croscarmellose, crosslinked polyvinyl pyrrolidone, citric acid, crospovidone, cysteine, ethylcellulose, gelatin, hydroxypropyl cellulose, hydroxypropyl methylcellulose, lactose, magnesium stearate, maltitol, mannitol, methionine, methylcellulose, methyl paraben, microcrystalline cellulose, polyethylene glycol, polyvinyl pyrrolidone, povidone, pregelatinized starch, propyl paraben, retinyl palmitate, shellac, silicon dioxide, sodium carboxymethyl cellulose, sodium citrate, sodium starch glycolate, sorbitol, starch (corn), stearic acid, sucrose, talc, titanium dioxide, vitamin A, vitamin E, vitamin C, and xylitol.

[1187] Pharmaceutically acceptable salts: The present disclosure also comprises pharmaceutically acceptable salts of the compounds described herein. As used herein, “pharmaceutically acceptable salts” refers to derivatives of the disclosed compounds wherein the parent compound is modified by converting an existing acid or base moiety to its salt form (e.g., by reacting the free base group with a suitable organic acid). Examples of pharmaceutically acceptable salts comprise, but are not limited to, mineral or organic acid. salts of basic residues such as amines; alkali or organic salts of acidic residues such as carboxylic acids; and the like. Representative acid addition salts comprise acetate, acetic acid, adipate, alginate, ascorbate, aspartate, benzenesulfonate, benzene sulfonic acid, benzoate, bisulfate, borate, butyrate, camphorate, camphorsulfonate, citrate, cyclopentanepropionate, digluconate, dodecylsulfate, ethanesulfonate, fumarate, glucoheptonate, glycerophosphate, hemisulfate, heptonate, hexanoate, hydrobromide, hydrochloride, hydroiodide, 2-hydroxy-ethanesulfonate, lactobionate, lactate, laurate, laurel sulfate, malate, maleate, malonate, methanesulfonate, 2-naphthalenesulfonate, nicotinate, nitrate, oleate, oxalate, palmitate, pamoate, pectinate, persulfate, 3-phenylpropionate, phosphate, picrate, pivalate, propionate, stearate, succinate, sulfate, tartrate, thiocyanate, toluenesulfonate, undecanoate, valerate salts, and the like. Representative alkali or alkaline earth metal salts comprise sodium, lithium, potassium, calcium, magnesium, and the like, as well as nontoxic ammonium, quaternary ammonium, and amine cations, comprising, but not limited to ammonium, tetramethvlammonium, tetraethylammonium, methylamine, dimethylamine, trimethylamine, triethyla.mine, ethylamine, and the like. The pharmaceutically acceptable salts of the present disclosure comprise the conventional non-toxic salts of the parent compound formed, for example, from non-toxic inorganic or organic acids. The pharmaceutically acceptable salts of the present disclosure can be synthesized from the parent compound which contains a basic or acidic moiety by conventional chemical methods. Generally, such salts can be prepared by reacting the free acid or base forms of these compounds with a stoichiometric amount of the appropriate base or acid in water or in an organic solvent, or in a mixture of the two; generally, nonaqueous media like ether, ethyl acetate, ethanol, isopropanol, or acetonitrile can be used. Lists of suitable salts are found in Remington's Pharmaceutical Sciences, 17^{th} ed., Mack Publishing Company, Easton, Pa., 1985, p. 1418, Pharmaceutical Salts: Properties, Selection, and Use, P. H. Stahl and C. G. Wermuth (eds.), Wiley-VCH, 2008, and Berge et al., Journal of Pharmaceutical Science, 66, 1-19 (1977), the contents of which are each incorporated herein by reference in their entireties, insofar as they do not conflict with the present disclosure.

[1188] Pharmaceutically acceptable solvate: The term “pharmaceutically acceptable solvate,” as used herein, means a compound of the present disclosure wherein molecules of a suitable solvent are incorporated in the crystal lattice. A suitable solvent is physiologically tolerable at the dosage administered. For example, solvates may be prepared by crystallization, recrystallization, or precipitation from a solution that comprises organic solvents, water, or a mixture thereof. Examples of suitable solvents are ethanol, water (for example, mono-, di-, and tri-hydrates)), N-methylpyrrolidinone (NMP), dimethyl sulfoxide (DMSO), N,N′-dimethylformamide (DMF), N,N′-dimethylacetamide (DMAC), 1,3-dimethyl-2-imidazolidinone (DMEU), 1,3-dimethyl-3,4,5,6-tetrahydro-2-(1H)-pyrimidinone (DMPU), acetonitrile (ACN), propylene glycol, ethyl acetate, benzyl alcohol, 2-pyrrolidone, benzyl benzoate, and the like. When water is the solvent, the solvate is referred to as a “hydrate.”

[1189] Pharmacokinetic: As used herein, “pharmacokinetic” refers to any one or more properties of a molecule or compound as it relates to the determination of the fate of substances administered to a living organism. Pharmacokinetics is divided into several areas comprising the extent and rate of absorption, distribution, metabolism and excretion. This is commonly referred to as ADME where: (A) Absorption is the process of a substance entering the blood circulation; (D) Distribution is the dispersion or dissemination of substances throughout the fluids and tissues of the body; (M) Metabolism (or Biotransformation) is the irreversible transformation of parent compounds into daughter metabolites; and (E) Excretion (or Elimination) refers to the elimination of the substances from the body. In rare cases, some drugs irreversibly accumulate in body tissue,

[1190] Physicochemical: As used herein, “physicochemical” means of or relating to a physical and/or chemical property.

[1191] Preventing: As used herein, the term “preventing” or “prevention” refers to partially or completely delaying onset of an infection, disease, disorder and/or condition; partially or completely delaying onset of one or more symptoms, features, or clinical manifestations of a particular infection, disease, disorder, and/or condition; partially or completely delaying onset of one or more symptoms, features, or manifestations of a particular infection, disease, disorder, and/or condition; partially or completely delaying progression from an infection, a particular disease, disorder and/or condition; and/or decreasing the risk of developing pathology associated with the infection, the disease, disorder, and/or condition.

[1192] Proliferate: As used herein, the term “proliferate” means to grow, expand or increase or cause to grow, expand or increase rapidly. “Proliferative” means having the ability to proliferate. “Anti-proliferative” means having properties counter to or inapposite to proliferative properties.

[1193] Prophylactic: As used herein, “prophylactic” refers to a therapeutic or course of action used to prevent the spread of disease.

[1194] Prophylaxis: As used herein, a “prophylaxis” refers to a measure taken to maintain health and prevent the spread of disease.

[1195] Protein of interest: As used herein, the terms “proteins of interest” or “desired proteins” comprise those provided herein and fragments, mutants, variants, and alterations thereof.

[1196] Proximal: As used herein, the term “proximal” means situated nearer to the center or to a point or region of interest.

[1197] Purified: As used herein, “purify,” “purified,” “purification” means to make substantially pure or clear from unwanted components, material defilement, admixture or imperfection. “Purified” refers to the state of being pure. “Purification” refers to the process of making pure.

[1198] Region: As used herein, the term “region” refers to a zone or general area. In certain embodiments, when referring to a protein or protein module, a region may comprise a linear sequence of amino acids along the protein or protein module or may comprise a three-dimensional area, an epitope and/or a cluster of epitopes. In certain embodiments, regions comprise terminal regions. As used herein, the term “terminal region” refers to regions located at the ends or termini of a given agent. When referring to proteins, terminal regions may comprise N- and/or C-termini. N-termini refer to the end of a protein comprising an amino acid with a free amino group. C-termini refer to the end of a protein comprising an amino acid with a free carboxyl group. N- and/or C-terminal regions may there for comprise the N- and/or C-termini as well as surrounding amino acids. In certain embodiments, N- and/or C-terminal regions comprise from about 3 amino acid to about 30 amino acids, from about 5 amino acids to about 40 amino acids, from about 10 amino acids to about 50 amino acids, from about 20 amino acids to about 100 amino acids and/or at least 100 amino acids. In certain embodiments, N-terminal regions may comprise any length of amino acids that comprises the N-terminus but does not comprise the C-terminus. In certain embodiments, C-terminal regions may comprise any length of amino acids, which comprise the C-terminus, but do not comprise the N-terminus.

[1199] In certain embodiments, when referring to a polynucleotide, a region may comprise a linear sequence of nucleic acids along the polynucleotide or may comprise a three-dimensional area, secondary structure, or tertiary structure. In certain embodiments, regions comprise terminal regions. As used herein, the term “terminal region” refers to regions located at the ends or termini of a given agent. When referring to polynucleotides, terminal regions may comprise 5′ and 3′ termini. 5′ termini refer to the end of a polynucleotide comprising a nucleic acid with a free phosphate group. 3′ termini refer to the end of a polynucleotide comprising a nucleic acid with a free hydroxyl group. 5′ and 3′ regions may there for comprise the 5′ and 3′ termini as well as surrounding nucleic acids. In certain embodiments, 5′ and 3′ terminal regions comprise from about 9 nucleic acids to about 90 nucleic acids, from about 15 nucleic acids to about 120 nucleic acids, from about 30 nucleic acids to about 150 nucleic acids, from about 60 nucleic acids to about 300 nucleic acids and/or at least 300 nucleic acids. In certain embodiments, 5′ regions may comprise any length of nucleic acids that comprises the 5′ terminus but does not comprise the 3′ terminus. In certain embodiments, 3′ regions may comprise any length of nucleic acids, which comprise the 3′ terminus, but does not comprise the 5′ terminus.

[1200] RNA or RNA molecule: As used herein, the term “RNA” or “RNA molecule” or “ribonucleic acid molecule” refers to a polymer of ribonucleotides; the term “DNA” or “DNA molecule” or “deoxyribonucleic acid molecule” refers to a polymer of deoxyribonucleotides. DNA and RNA can be synthesized naturally, e.g., by DNA replication and transcription of DNA, respectively; or be chemically synthesized. DNA and RNA can be single-stranded (i.e., ssRNA or ssDNA, respectively) or multi-stranded (e.g., double stranded, i.e., dsRNA and dsDNA, respectively). The term “mRNA” or “messenger RNA”, as used herein, refers to a single stranded RNA that encodes the amino acid sequence of one or more polypeptide chains.

[1201] RNA interfering, or RATAi: As used herein, the term “RNA interfering” or “RNAI” refers to a sequence specific regulatory mechanism mediated by RNA molecules which results in the inhibition or interfering or “silencing” of the expression of a corresponding protein-coding gene. RNAi has been observed in many types of organisms, comprising plants, animals and fungi. RNAi occurs in cells naturally to remove foreign RNAs (e.g., viral RNAs). Natural RNAi proceeds via fragments cleaved from free dsRNA which direct the degradative mechanism to other similar RNA sequences. RNAi is controlled by the RNA-induced silencing complex (RISC) and is initiated by short/small dsRNA molecules in cell cytoplasm, where they interact with the catalytic RISC component argonaute. The dsRNA molecules can be introduced into cells exogenously. Exogenous dsRNA initiates RNAi by activating the ribonuclease protein Dicer, which binds and cleaves dsRNAs to produce double-stranded fragments of 21-25 base pairs with a few unpaired overhang bases on each end. These short double stranded fragments are called small interfering RNAs (siRNAs),

[1202] Sample: As used herein, the term “sample” or “biological sample” refers to a subset of its tissues, cells or component parts (e.g. body fluids, comprising but not limited to blood, mucus, lymphatic fluid, synovial fluid, cerebrospinal fluid, saliva, amniotic fluid, amniotic cord blood, urine, vaginal fluid and semen). A sample further may comprise a homogenate, lysate or extract prepared from a whole organism or a subset of its tissues, cells or component parts, or a fraction or portion thereof, comprising but not limited to, for example, plasma, serum, spinal fluid, lymph fluid, the external sections of the skin, respiratory, intestinal, and genitourinary tracts, tears, saliva, milk, blood cells, tumors, organs. A sample further refers to a medium, such as a nutrient broth or gel, which may contain cellular components, such as proteins or nucleic acid molecule.

[1203] Self-complementary viral particle: As used herein, a “self-complementary viral particle” is a particle comprised of at least two components, a protein capsid and a polynucleotide sequence encoding a self-complementary genome enclosed within the capsid.

[1204] Sense Strand: As used herein, the term “the sense strand” or “the second strand” or “the passenger strand” of a siRNA molecule refers to a strand that is complementary to the antisense strand or first strand. The antisense and sense strands of a siRNA molecule are hybridized to form a duplex structure. As used herein, a “siRNA duplex” comprises a siRNA strand having sufficient complementarity to a section of about 10-50 nucleotides of the mRNA of the gene targeted for silencing and a siRNA strand haying sufficient complementarity to form a duplex with the other siRNA strand.

[1205] Short interfering RNA or siRNA: As used herein, the terms “short interfering RNA,” “small interfering RNA” or “siRNA” refer to an RNA molecule (or RNA analog) comprising between about 5-60 nucleotides (or nucleotide analogs) which is capable of directing or mediating RNAi. In certain embodiments, a siRNA molecule comprises between about 15-30 nucleotides or nucleotide analogs, such as between about 16-25 nucleotides (or nucleotide analogs), between about 18-23 nucleotides (or nucleotide analogs), between about 19-22 nucleotides (or nucleotide analogs) (e.g., 19, 20, 21 or 22 nucleotides or nucleotide analogs), between about 19-25 nucleotides (or nucleotide analogs), and between about 19-24. nucleotides (or nucleotide analogs). The term “short” siRNA refers to a siRNA comprising 5-23 nucleotides, such as 21 nucleotides (or nucleotide analogs), for example, 19, 20, 21 or 22 nucleotides. The term “long” siRNA refers to a siRNA comprising 24-60 nucleotides, such as about 24-25 nucleotides, for example, 23, 24, 25 or 26 nucleotides. Short siRNAs may, in some instances, comprise fewer than 19 nucleotides, e.g., 16, 17 or 18 nucleotides, or as few as 5 nucleotides, provided that the shorter siRNA retains the ability to mediate RNAi. Likewise, long siRNAs may, in some instances, comprise more than 26 nucleotides, e.g., 27, 28, 29, 30, 35, 40, 45, 50, 55, or even 60 nucleotides, provided that the longer siRNA retains the ability to mediate RNAi or translational repression absent further processing, e.g., enzymatic processing, to a short siRNA. siRNAs can be single stranded RNA molecules ss-siRNAs) or double stranded RNA molecules (ds-siRNAs) comprising a sense strand and an antisense strand which hybridized to form a duplex structure called siRNA duplex.

[1206] Signal Sequences: As used herein, the phrase “signal sequences” refers to a sequence which can direct the transport or localization of a protein.

[1207] Single unit dose: As used herein, a “single unit dose” is a dose of any therapeutic administered in one dose/at one time/single route/single point of contact, i.e., single administration event. In certain embodiments, a single unit dose is provided as a discrete dosage form (e.g., a tablet, capsule, patch, loaded syringe, vial, etc.).

[1208] Similarity: As used herein, the term “similarity” refers to the overall relatedness between polymeric molecules, e.g. between polynucleotide molecules (e.g. DNA molecules and/or RNA molecules) and/or between polypeptide molecules. Calculation of percent similarity of polymeric molecules to one another can be performed in the same manner as a calculation of percent identity, except that calculation of percent similarity takes into account conservative substitutions as is understood in the art.

[1209] Split dose: As used herein, a “split dose” is the division of single unit dose or total daily dose into two or more doses.

[1210] Stable: As used herein “stable” refers to a compound that is sufficiently robust to survive isolation to a useful degree of purity from a reaction mixture, and in certain embodiments, capable of formulation into an efficacious therapeutic agent.

[1211] Stabilized: As used herein, the term “stabilize”, “stabilized,” “stabilized region” means to make or become stable.

[1212] Subject: As used herein, the term “subject” or “patient” refers to any organism to which a composition in accordance with the present disclosure may he administered, e.g., for experimental, diagnostic, prophylactic, and/or therapeutic purposes. Typical subjects comprise animals (e.g., mammals such as mice, rats, rabbits, non-human primates, and humans) and/or plants. The subject or patient may seek or need treatment, require treatment, is receiving treatment, will receive treatment, or is under care by a trained professional for a particular disease or condition.

[1213] Substantially: As used herein, the term “substantially” refers to the qualitative condition of exhibiting total or near-total extent or degree of a characteristic or property of interest. One of ordinary skill in the biological arts will understand that biological and chemical phenomena rarely, if ever, go to completion and/or proceed to completeness or achieve or avoid an absolute result. The term “substantially” is therefore used herein to capture the potential lack of completeness inherent in many biological and chemical phenomena.

[1214] Substantially equal: As used herein as it relates to time differences between doses, the term means plus/minus 2%.

[1215] Substantially simultaneously: As used. herein and as it relates to plurality of doses, the term means within 2 seconds.

[1216] Suffering from: An individual who is “suffering from” a disease, disorder, and/or condition has been diagnosed with or displays one or more symptoms of a disease, disorder, and/or condition.

[1217] Susceptible to: An individual who is “susceptible to” a disease, disorder, and/or condition has not been diagnosed with and/or may not exhibit symptoms of the disease, disorder, and/or condition but harbors a propensity to develop a disease or its symptoms. In certain embodiments, an individual who is susceptible to a disease, disorder, and/or condition (fir example, cancer) may be characterized by one or more of the following: (1) a genetic mutation associated with development of the disease, disorder, and/or condition; (2) a genetic polymorphism associated with development of the disease, disorder, and/or condition; (3) increased and/or decreased expression and/or activity of a protein and/or nucleic acid associated with the disease, disorder, and/or condition; (4) habits and/or lifestyles associated with development of the disease, disorder, and/or condition; (5) a family history of the disease, disorder, and/or condition; and (6) exposure to and/or infection with a microbe associated with development of the disease, disorder, and/or condition. In certain embodiments, an individual who is susceptible to a disease, disorder, and/or condition will develop the disease, disorder, and/or condition. In certain embodiments, an individual who is susceptible to a disease, disorder, and/or condition will not develop the disease, disorder, and/or condition.

[1218] Sustained release: As used herein, the term “sustained release” refers to a pharmaceutical composition or compound release profile that conforms to a release rate over a specific period of time,

[1219] Synthetic: The term “synthetic” means produced, prepared, and/or manufactured by the hand of man. Synthesis of polynucleotides or polypeptides or other molecules of the present disclosure may be chemical or enzymatic.

[1220] Targeting: As used herein, “targeting” means the process of design and selection of nucleic acid sequence that will hybridize to a target nucleic acid and induce a desired effect.

[1221] Targeted Cells: As used herein, “targeted cells” refers to any one or more cells of interest. The cells may be found in vitro, in vivo, in situ or in the tissue or organ of an organism. The organism may he an animal, such as a mammal, a human, or a human patient.

[1222] Terminal region: As used herein, the term “terminal region” refers to a region on the 5′ or 3′ end of a region of linked nucleosides or amino acids (polynucleotide or polypeptide, respectively).

[1223] Terminally optimized: The term “terminally optimized” when referring to nucleic acids means the terminal regions of the nucleic acid are improved in some way, e.g., codon optimized, over the native or wild type terminal regions.

[1224] Therapeutic Agent: The term “therapeutic agent” refers to any agent that, when administered to a subject, has a therapeutic, diagnostic, and/or prophylactic effect and/or elicits a desired biological and/or pharmacological effect.

[1225] Therapeutically effective amount: As used herein, the term “therapeutically effective amount” means an amount of an agent to be delivered (e.g., nucleic acid, drug, therapeutic agent, diagnostic agent, prophylactic agent, etc.) that is sufficient, when administered to a subject suffering from or susceptible to an infection, disease, disorder, and/or condition, to treat, improve symptoms of, diagnose, prevent, and/or delay the onset of the infection, disease, disorder, and/or condition. in certain embodiments, a therapeutically effective amount is provided in a single dose. In certain embodiments, a therapeutically effective amount is administered in a dosage regimen comprising a plurality of doses. Those skilled in the art will appreciate that in certain embodiments, a unit dosage form may be considered to comprise a therapeutically effective amount of a particular agent or entity if it comprises an amount that is effective when administered as part of such a dosage regimen.

[1226] Therapeutically effective outcome: As used herein, the term “therapeutically effective outcome” means an outcome that is sufficient in a subject suffering from or susceptible to an infection, disease, disorder, and/or condition, to treat, improve symptoms of, diagnose, prevent, and/or delay the onset of the infection, disease, disorder, and/or condition.

[1227] Total daily dose: As used herein, a “total daily dose” is an amount given or prescribed in 24-hour period. It may be administered as a single unit dose.

[1228] Transfection: As used herein, the term “transfection” refers to methods to introduce exogenous nucleic acids into a cell. Methods of transfection comprise, but are not limited to, chemical methods, physical treatments and cationic lipids or mixtures,

[1229] Treating: As used herein, the term “treating” refers to partially or completely alleviating, ameliorating, improving, relieving, delaying onset of, inhibiting progression of, reducing severity of, and/or reducing incidence of one or more symptoms or features of a particular infection, disease, disorder, and/or condition. For example, “treating” cancer may refer to inhibiting survival, growth, and/or spread of a tumor. Treatment may be administered to a subject who does not exhibit signs of a disease, disorder, and/or condition and/or to a subject who exhibits only early signs of a disease, disorder, and/or condition for the purpose of decreasing the risk of developing pathology associated with the disease, disorder, and/or condition.

[1230] Unmodified: As used herein, “unmodified” refers to any substance, compound or molecule prior to being changed in any way. Unmodified may, but does not always, refer to the wild type or native form of a biomolecule. Molecules may undergo a series of modifications whereby each modified molecule may serve as the “unmodified” starting molecule for a subsequent modification.

[1231] Vector: As used herein, a “vector” is any molecule or moiety which transports, transduces or otherwise acts as a carrier of a heterologous molecule. Vectors of the present disclosure may be produced recombinantly and may be based on and/or may comprise adeno-associated virus (AAV) parent or reference sequence. Such parent or reference AAV sequences may serve as an original, second, third or subsequent sequence for engineering vectors. In non-limiting examples, such parent or reference AAV sequences may comprise any one or more of the following sequences: a polynucleotide sequence encoding a polypeptide or multi-polypeptide, which sequence may he wild-type or modified from wild-type and which sequence may encode full-length or partial sequence of a protein, protein domain, or one or more subunits of a protein; a polynucleotide comprising a modulatory or regulatory nucleic acid which sequence may be wild-type or modified from wild-type; and a transgene that may or may not be modified from wild-type sequence. These AAV sequences may serve as either the “donor” sequence of one or more codons (at the nucleic acid level) or amino acids (at the polypeptide level) or “acceptor” sequences of one or more codons (at the nucleic acid level) or amino acids (at the polypeptide level).

[1232] Viral genome: As used herein, a “viral genome” or “vector genome” refers to the nucleic acid sequence(s) encapsulated in an AAV particle.

### VII. EQUIVALENTS AND SCOPE

[1233] Those skilled in the art will recognize or be able to ascertain using no more than routine experimentation, many equivalents to the specific embodiments in accordance with the present disclosure described herein. The scope of the present disclosure is not intended to be limited to the above Description, but rather is as set forth in the appended claims.

[1234] In the claims, articles such as “a,” “an,” and “the” may mean one or more than one unless indicated to the contrary or otherwise evident from the context. Claims or descriptions that comprise “or” between one or more members of a group are considered satisfied if one, more than one, or all of the group members are present in, employed in, or otherwise relevant to a given product or process unless indicated to the contrary or otherwise evident from the context. The present disclosure comprises embodiments in which exactly one member of the group is present in, employed in, or otherwise relevant to a given product or process. The present disclosure comprises embodiments in which more than one, or the entire group members are present in, employed in, or otherwise relevant to a given product or process,

[1235] It is also noted that the term “comprising” is intended to be open and permits but does not require the inclusion of additional elements or steps. When the term “comprising” is used herein, the term “consisting of” is thus also encompassed and disclosed.

[1236] Where ranges are given, endpoints are comprised. Furthermore, it is to be understood that unless otherwise indicated or otherwise evident from the context and understanding of one of ordinary skill in the art, values that are expressed as ranges can assume any specific value or subrange within the stated ranges in different embodiments of the present disclosure, to the tenth of the unit of the lower limit of the range, unless the context clearly dictates otherwise.

[1237] In addition, it is to be understood that any particular embodiment of the present disclosure that falls within the prior art may be explicitly excluded from any one or more of the claims. Since such embodiments are deemed to be known to one of ordinary skill in the art, they may be excluded even if the exclusion is not set forth explicitly herein. Any particular embodiment of the compositions of the present disclosure (e.g., any antibiotic, therapeutic or active ingredient; any method of production; any method of use; etc.) can be excluded from any one or more claims, for any reason, whether or not related to the existence of prior art.

[1238] It is to be understood that the words which have been used are words of description rather than limitation, and that changes may be made within the purview of the appended claims without departing from the true scope and spirit of the present disclosure in its broader aspects.

[1239] While the present disclosure has been described at some length and with some particularity with respect to the several described embodiments, it is not intended that it should be limited to any such particulars or embodiments or any particular embodiment, but it is to be construed with references to the appended claims so as to provide the broadest possible interpretation of such claims in view of the prior art and, therefore, to effectively encompass the intended scope of the present disclosure.

[1240] All publications, patent applications, patents, and other references mentioned herein are incorporated by reference in their entirety. In case of conflict, the present specification, comprising definitions, will control. In addition, section headings, the materials, methods, and examples are illustrative only and not intended to be limiting.

### VIII. EXAMPLES

### Example 1. Production of Source Rep/Cap BIICs (A)

### CP BEE Pool

[1241] One vial of the Sf9 CB was thawed in a 125 mL shaker flask (37° C. using waterbath, 1-5 minutes until ice crystals dissipate), and then diluted into 19-20 mL working volume of Hvclone SFX Insect Cell Culture Media. The shaker flask was incubated at 27° C. (135 rpm shaking, 0% v/v of CO₂) in a first expansion (P0, 3-4 days) until the cell density of the Sf9 cell mixture was expanded to 4.0×10⁶ cells/mL.

[1242] The cell mixture was then seeded and expanded through multiple additional expansion steps using larger shaker flasks, with a target output density of 4.0×10⁶ cells/mL for each expansion step to allow for a consistent seeding density of 0.5-1.5×10⁶ cells/mL in subsequent expansion steps. Expansions were completed at 27° C. for 3-5 days (0% v/v of CO₂) with 135 rpm shaking (≤2 L working volume) or 90 rpm shaking (>2 L working volume). The following additional expansions were completed: (i) expansion up to 200 mL working volume in a 1.0 L flask; and (ii) expansion up to 1000 mL working volume in a 3 L flask.

[1243] A Rep/Cap Transfection Mixture was prepared by combining 5 μg of Rep/Cap Bacmid. material with 375 μL of WFI water. The diluted Bacmid mixture was combined with 30 μL of Promega FuGENE HD (Transfection Agent) and an additional 345 μL of WFI water, and then incubated at 27° C. for 15 minutes to provide a Transfection Cocktail.

[1244] 25 mL of expanded Sf9 cell mixture was seeded into a 125 mL flask (1.0×10⁶ cells/mL seeding concentration) and expanded to a target infection density of 2.5-4.0×10⁶ cells/mL. The Transfection Cocktail was added to the 125 mL flask and incubated at 27° C. for 5-7 days (0% v/v of CO₂, 135 rpm agitation). The resulting mixture was centrifuged in 50 mL conical tubes for 5 minutes, and the supernatant containing P1 BEVs was collected and. pooled with other PI BEV supernatants, The P1 BEV pool was stored at 5° C.

[1245] Expanded Sf9 cell mixture was seeded into a Cellstar 6-well Cell Polystyrene Culture Plate (2 mL per well, 0.5-1.0×10⁶ cells/mL seeding concentration) with gentle rocking to evenly distribute cells, followed by incubation at 27° C. for 90 minutes (0% v/v of CO₂, 0 rpm agitation). P1 BEVs were serial diluted with 1-lyclone SFX Insect Cell Culture Media to a target dilution of 1.0×10⁷ BEVs/mL, and then 1 mL of diluted P1 BEV mixture was added to each well with gentle rocking to evenly distribute P1 BEVs. The infection mixture was incubated at 27° C. for 90 minutes (0% v/v of CO₂, 0 rpm agitation),

[1246] Agarose gel was prepared by combining 4% w/v agarose 1:3 with Life Technologies Sf-900 Medium overlay (melt agarose at 70° C., cool to 37° C. for combination). 2 mL of Agarose Overlay was then added to each well, and the plates were maintained at room temperature for 15-20 minutes for the agarose gel to harden. Overlaid plates were then incubated at 27° C. for 5-14 days (0% v/v of CO₂, 0 rpm agitation) until plaque formation was observed. Plaques in each well were processed through testing and Plaque Picking to provide a single Plaque for Clonal Plaque Purification (i.e. Single Plaque Expansion). The Single Plaque was expanded using SIP cell mixture and incubated at 27° C. for 3-5 days (0% v/v of CO₂, 0 rpm. agitation). The resulting CPI BEVs were harvested using centrifugation in 50 mL conical tubes for 5 minutes and collection of supernatant containing CP1 BEVs into a CP1 BEV pool.

### BEV Infection/BIIC Production

[1247] Sf9 cell mixture was seeded and expanded through multiple expansion steps using larger shaker flasks, with a target output density of 4.0×10⁶ cells/mL for each expansion step to allow for a consistent seeding density of 0.5-1.0×10⁶ cells/mL in subsequent expansion steps. Expansions were completed at 27° C. for 3-5 days (0% v/v of CO₂) with 135 rpm shaking (≤2 L working volume) or 90 rpm shaking (>2 L working volume). The following expansions were completed: (i) expansion up to 200 mL working volume in a 1.0 L (ii) expansion up to 1000 mL working volume in a 3 L flask; and (iii) expansion up to 2500 mL working volume in a 5 L flask, with a final output density of 2.0×10⁶ cells/mL.

[1248] 200 mL of expanded Sf9 cell mixture was seeded into a 1.0 L flask (1.0×10⁶ cells/mL seeding density) and expanded to a viable infection cell density of ≥2.0×10⁶ cells/mL, and then infected with 0.01 MOI of CP1 BEV. Infected cells were then incubated and expanded at 27° C. for 48-80 hours (0% v/v of CO₂, 135 rpm) until cells reach ≥2.0×10⁶ cells/mL (VCD), ≥16.5 μm cell diameter and ≥75% cell viability. The infected cells were harvested by spinning down (polypropylene centrifuge tubes, 5 min) and resuspending the cell pellet at 4.0×10⁷ cells/mL in Hyclone SFX Insect Cell Culture Media, followed by the addition of 300 mM Trehalose, 14% v/v of DMSO, and additional SEX Culture Media to provide target VCD of 2.0×10⁶ cells/mL. Rep/Cap Source BIICs were aliquoted into 2 mL or 5 mL cryovials and frozen down to ≤−65° C. using control rate freezer, and then stored at −80° C. or in LN₂ vapor.

### Example 2. Production of Source Transgene BIICs (A)

[1249] Transgene Source BIICs were produced according to Example 1, with Transgene Bacmid. material used for P1 BEV production instead of Rep/Cap Bacmid material.

### Example 3. Production Source ReplCap BIICs (B)

### CP BEV Pool

[1250] One vial of the Sf9 CB was thawed in a 125 mL shaker flask (37° C. using waterbath, 1-5 minutes until ice crystals dissipate), and then diluted into 40 mL working volume of Hyclone SFX Insect Cell Culture Media. The shaker flask was incubated for a first expansion (P0, 3-4 days) until the cell density of the Sf9 cell mixture was expanded to 4.0×10⁶ cells/mL.

[1251] The culture was then seeded and expanded through multiple additional expansion steps using larger shaker flasks, with a target output density of 4.0×10⁶ cells/int for each expansion step to allow for a consistent seeding density of 0.5-1.0×10⁶ cells/mL in subsequent expansion steps. Expansions were completed at 27° C. for 3-5 days and comprised: (i) expansion up to 200 mL working volume in a 1.0 L flask (PI); and (ii) expansion up to 1000 mL working volume in a 3 L flask (P2).

[1252] A Rep/Cap Transfection Mixture was prepared by combining 30 μg of Rep/Cap Bacmid material with 0.6 mL of ThermtoFisher Grace's insect Media (Transfection Media). The diluted Bacmid mixture was combined with 30 μL of ThermoFisher Cellfectin II Reagent (Transfection Agent) and an additional 0.6 mL of Transfection Media, followed by incubation at 18-25° C. for 25-35 minutes, and then further dilution with 4.8 mL of Transfection Media to provide a Transfection Cocktail.

[1253] 60 mL of expanded Sf9 cell mixture was seeded into a 125 mL flask and expanded up to 1.0×10⁶ cells/int seeding concentration. The Sf9 cell mixture was then seeded into a 6-well Cell Culture Plate (2 mL per well, 1.0×10⁶ cells/mL seeding concentration). 1 mL of Transfection Cocktail was added to each well, and the plate was incubated at 27° C. for 4-5 hours. 2 mL of Hyclone SFX Insect Cell Culture Media was added to each well, and the plates were then incubated at 27° C. for 3-4 days. The resulting mixtures were centrifuged in 50 mL conical tubes for 5 minutes, and supernatant containing P1 BEVs was collected and pooled with other P1 BEV supernatants. The P1 BEV pool was stored at 4-8° C.

[1254] Expanded Sf9 cell mixture was seeded into a 6-well Cell Culture Plate (2 mL per well, 0.5-1.0 cells/mL seeding concentration) with gentle rocking to evenly distribute cells, followed by incubation at 27° C. for 90 minutes. P1 BEVs were serial diluted with Hyclone SFX Insect Cell Culture Media to a target dilution of 1.0-5.0×10⁷ BEVs, and then 1 mL of diluted P1 BEV mixture was added to each well with gentle rocking to evenly distribute P1 BEVs. The infection mixture was incubated at 27° C. for 90 minutes.

[1255] Agarose gel was prepared by combining 4% w/v agarose 1:3 with Life Technologies Sf-900 Medium overlay. Agarose Overlay was added to each well, and the plates were maintained at room temperature for 15-20 minutes for the agarose gel to harden. Overlaid plates were then incubated at 27° C. for 10 days until plaque formation was observed. Plaques in each well were processed through testing and Plaque Picking to provide a single Plaque for Clonal Plaque Purification (i.e. Single Plaque Expansion). The Single Plaque was expanded using Std cell mixture of 120 mL pools in 500 mL flask, with incubation at 27° C. for 4 days, The resulting CP2 BEVs were harvested using centrifugation in 50 mL conical tubes for 5 minutes and collection of supernatant containing CP2 BEVs into a CP2 BEV pool.

### BEV Infection/BIIC Production

[1256] Sf9 cell mixture was seeded and expanded through multiple expansion steps up to 3000 mL working volume in a 5L flask, with a final infection density of 1.0×10⁶ cells/mL. The expanded Sf9 cell mixture was then infected with 0.01 MO1 of CP2 BEV. Infected cells were incubated and expanded at 27° C. for 48-36 hours, then harvested by spinning down (polypropylene centrifuge tubes, 5 min) and resuspending the cell pellet at 2.0×10⁷ cells/mt in Hyclone SFX Insect Cell Culture Media, followed by the addition of 300 nM Trehalose, 14% v/v of DMSO, and additional SFX Culture Media to provide target VCD of 2.0×10⁶ cells/mL. Rep/Cap Source BIICs were aliquoted into 2 mL or 5 mL cryovials and frozen down to ≤−65° C. using control rate freezer, and then stored at −80° C. or in LN₂ vapor.

### Example 4. Production of Source Transgene BACs (B)

[1257] Transgene Source BIICs were produced according to Example 3, with Transgene Bacmid material used for P1 BEV production instead of Rep/Cap Bacmid material.

### Example 5. Production of Infection BIICs from Source BIICs

[1258] One vial of Sf9 9f4 CB was thawed in a 125 mL shaker flask (37° C. using waterbath, 1-5 minutes until ice crystals dissipate), and then diluted into 20 mL working volume of ESF-AF culture medium. The shaker flask was incubated at 27° C. (100 rpm shaking, 2-inch orbital diameter) in a non-humidified, ambient air, temperature regulated incubator in a first expansion until the cell density was expanded to between 5.0-8.0×10⁶ cells/mL.

[1259] The culture was then seeded and expanded through multiple additional expansion steps using larger shaker flasks, with a target output density of 5.0-8.0×10⁶ cells/mL for each expansion step to allow for a consistent seeding density of 1.0-1.5×10⁶ cells/mi, in subsequent expansion steps. Expansions were completed at 27° C. for 3-5 days with 100 rpm shaking (≤2 L working volume) or 80 rpm shaking (>2 L working volume).

[1260] The following additional expansions were completed: (i) expansion up to 100 mL working volume in a 500mL flask; (ii) expansion up to 400 mL working volume in a 1.0 L flask; (iii) expansion up to 1500 mL working volume in a 3 L flask; and (iv) expansion up to 2500 mL working volume in each of two 5 L Production Flasks (Rep/Cap Production Flask and Transgene Production Flask).

[1261] The Rep/Cap Production Flask was incubated until cell concentration was expanded to 1.8-2.5×10⁶ cells/mL and was then infected with Rep/Cap Source BIIC (Sf9:BIIC Infection Ratio of 1.0 ×10⁴ cell to cell (c/c), equivalent to 1.0×10⁵ (v/v) infection ratio). The infected cells were incubated for 72 hours (target cell diameter of ≥19.0 μm, cell culture density target of ≥3.0×10⁶ cells/mL), and then harvested by spinning down (polypropylene centrifuge tubes, 5 min at 4.0° C.) and resuspending the cell pellet at 2.0×10⁷ cells/mL in 50% 2× Freezing media (858 mL/L of ESF-AF Media, 140 mL/L of Dimethyl Sulfoxide, 113 mL/L of Trehalose, dihydrate) and 50% ESF-AF Media. The resuspended culture of Rep/Cap Infection BIICs was aliquoted into 2 mL or 5 mL ctyovials and stored in LN₂ vapor.

[1262] The Transgene Production Flask was incubated until cell concentration was expanded to 1.8-2.5×10⁶ cells/mL and was then infected with Transgene Source BIIC (Sf9:BIIC Infection Ratio of 1.0 ×10⁴ cell-to-cell (c/c), equivalent to 1.0×10⁵ v/v infection ratio). The infected cells were incubated for 96-100 hours (target cell diameter of ≥19.0 μm, cell culture density target of 3.0×10⁶ cells/mL), and then harvested by spinning down (polypropylene centrifuge tubes, 5 min at 4.0° C.) and resuspending the cell pellet at 2.0×10⁷ cells/mL in 50% 2× Freezing media (858 mL/L of ESF-AF Media, 140 mL/L of Dimethyl Sulfoxide, 113 mL/L of Trehalose, dihydrate) and 50% ESF-AF Media. The resuspended culture of Transgene Infection BIICs was aliquoted into 2 ml, or 5 ml, cryovials and stored in LN₂ vapor.

### Example 6. Upstream Production of Bulk Particle Pool (A)

[1263] One vial of the SN 9f4 CB was thawed in a 125 mL shaker flask (37° C. using waterbath, 1-5 minutes until ice crystals dissipate), and then diluted into 20 mL working volume of ESF-AF culture medium. The shaker flask was incubated at 27 CC (130-150 rpm shaking, 25 mm orbital diameter) for about 48 hours in a non-humidified, ambient air, temperature regulated incubator in a first expansion until the cell density was expanded to between 5.0-8.0×10⁶ cells/mL.

[1264] The culture was then seeded and expanded through multiple additional expansion steps using larger shaker flasks, with a target output density of 5.0×10⁶-1.0×10⁷ cells/mL for each expansion step to allow for a consistent target seeding density of 1.0-1.5×10⁶ cells/mL in subsequent expansion steps. Expansions were completed at 27° C. for 3-5 days with 130-150rpm shaking (≤400 mL working volume) 100-120 rpm shaking (>400 mL working volume).

[1265] The following additional expansions were completed: (i) expansion up to 100 mL working volume in a 250 or 500 mL flask; (ii) expansion up to 400 mL working volume in a 1.0 L flask; (iii) expansion up to 1500 mL working volume in a 3 L flask; and (iv) expansion up to 2500 mL working volume in each of two 5 L flasks (5000 mL total working volume).

[1266] The expanded culture mixture was transferred to a 50 L GE WAVE bioreactor (0.25 mL/min fixed air sparge, oxygen on demand up to 40% dissolved O₂, 20 rpm rocking, 9° rocking angle, 250 mL/min air inlet) for an additional expansion (3-5 days at 27° C.) up to a 25 L working volume with a target output density of 5.0-8.0×10⁶ cells/mL. The culture medium was then seeded into a stirred-tank GE Xcellerax Bioreactor (68 rpm agitation, 0.5mL/min fixed air sparge, cascading oxygen on demand up to 40% dissolved O₂, 0.5 mL/min headspace flow rate), and expanded (N-1 Bioreactor step, 2-3 days at 27° C.) up to a 125 L working volume with a target output density of 1.5-2.0×10⁶ cells/mL.

[1267] The culture mixture was seeded into a single-use Production Bioreactor with a seeding density of 0.8-1.5×10⁶ cells/int and 200 L working volume. The culture medium was further expanded in the Bioreactor (6 W/m³ impeller, 0.8 mL/min fixed air sparge, cascading oxygen on demand up to 40% dissolved O₂, 0.8 mL/min headspace flow rate) up to 3.0-3.2×10⁶ cells/mL in a 200 L working volume.

[1268] The cells in the Bioreactor were then co-infected with Rep/Cap Infection BIICs (1:250k v/v) and Transgene Infection BIICs (1:80k v/v). Infected cells were incubated for 144 hours (6 days) and the bulk harvest was collected for lysis and processing through Downstream processing.

[1269] Samples were taken through each of the expansion and bioreaction steps to monitor cell density and viability throughout the upstream process.

[1270] In one alternative, the expansion Bioreactor was a Pall 200 L Allegro Bioreactor maintained as 35 rpm agitation, 1.3 mL/min fixed air sparge, cascading oxygen on demand up to 40% dissolved O₂, and 0.8mL/min headspace flow rate.

[1271] In one alternative, the processing parameters for the Production Bioreactor were 41 agitation rpm (pre-infection), 51 agitation rpm (post-infection), 2.5 mL/min fixed air sparge, cascading oxygen on demand up to 40% dissolved O₂, and 1.2 mL/min headspace flow rate, with a target expansion up to 3.2-3.4×10⁶ cells/mt in a 200 L working volume.

[1272] In one alternative, the expanded culture mixture was transferred to a Pall Allegro XRS 25 L Bioreactor for an additional expansion (25 cpm agitation, cascading oxygen on demand up to 40% dissolved O₂, 0.3 mL/min fixed air sparge, 0.5 mL/min headspace flow rate 3-5 days at 27° C.) up to a 10 L working; volume with a target output density of 5.0×10⁶-1.0×10⁷ cells/mL.

[1273] In one alternative, the N-1 bioreactor was a Pall I25L Allegro Bioreactor (45 rpm agitation, cascading oxygen on demand up to 40% dissolved O₂, 0.8 L/min air overlay, 27° C. vessel temp, 1.5 L/min O₂ flow rate) with a target output density of 5.0×10⁶-1.0×10⁷ cells/mL.

[1274] In one alternative, the N production bioreactor was a PD 200L Allegro Bioreactor (60 rpm agitation, cascading oxygen on demand up to 40% dissolved O₂, 1.2 L/min air overlay, 27±1° C. vessel temp, 2.5 L/min O₂ flow rate). The culture mixture was seeded into the Production Bioreactor with a target seeding density of about 1.0×10⁶ cells/mL and 200 L working volume. The culture medium was further expanded in the Bioreactor up to about 3.2×10⁶ cells/ad, in a 200 L working volume. The cells in the Bioreactor were then co-infected with Rep/Cap Infection BIICs (1:300k v/v) and Transgene Infection BACs (1:100k v/v). Infected cells were incubated for 168 hours (7 days). Post-infection, the bioreactor conditions were adjusted as follows: 70 rpm agitation, cascading oxygen on demand up to 40% dissolved O₂, 1.2 L/min air overlay, 27° C. vessel temp, 3.0 L/min O₂ flow rate. The bulk harvest was collected for lysis and processing through Downstream processing.

### Example 7. Upstream—Production of Bulk Particle Pool (B)

[1275] One vial of the Sf9 9f4 CB was thawed in a 125 mL shaker flask (37° C. using waterbath, 1-5 minutes until ice crystals dissipate), and then diluted into 20 mL working volume of ESE-AF culture medium. The shaker flask was incubated at 27° C. (100 rpm shaking, 2-inch orbital diameter) in a non-humidified, ambient air, temperature regulated incubator in a first expansion until the cell density was expanded to between 5.0-8.0×10⁶ cells/mL.

[1276] The culture was then seeded and expanded through multiple additional expansion steps using larger shaker flasks, with a target output density of 4.0-5.0×10⁶ cells/mL for each expansion step to allow for a consistent seeding density of 0.5×10⁶ cells/mL in subsequent expansion steps. Expansions were completed at 27° C. for 3-5 days with 100 rpm shaking (≤2 L working volume) or 80 rpm shaking (>2 L working volume).

[1277] The following additional expansions were completed: (i) expansion up to 200 mL working volume in a 1 L flask; (ii) expansion up to 1000 mL working volume in a 3 L flask; and (iii) expansion up to 3000 mL working volume in 5 L flasks.

[1278] 5 L of expanded culture mixture was spiked with 10% w/v Pluronic F-68 (2.045 v/v spike), which was then transferred to a 50 L GE WAVE bioreactor (0.25 mL/min fixed air sparge, oxygen on demand up to 40% dissolved O₂, 20 rpm rocking up to 9° angle) for an additional expansion (3-5 days at 27° C.) up to a 25 L working volume with a target output density of 3.0×10⁶ cells/mL.

[1279] The culture medium was spiked again with 10% w/v Pluronic F-68 (2.045 v/v spike) and then seeded into a GE 250 L Xcellerax Bioreactor with a seeding density of 0.8×10⁶ cells/mi. and 125 L working volume (Hvcione SFX Insect Cell Culture Media). The culture medium was expanded in the Bioreactor for 2-4 days (cascading oxygen on demand up to 40% dissolved O₂, 1 L/min air overlay, 27° C. vessel temp, 60° C. vent heater temp, downward mixer direction of 80 rpm) up to 3.0×10⁶ cells/mL in a 200 L working volume.

[1280] The cells in the Bioreactor were then co-infected with Rep/Cap Infection BIICs and Transgene Infection BIICs (1:1 BLIC ratio, 5.0 ×10³ SF9:BIIC ratio). Infected cells were incubated for 5-7 days and the bulk harvest was collected for lysis and processing through Downstream processing.

[1281] Samples were taken through each of the expansion and bioreaction steps to monitor cell density and viability throughout the upstream process.

### Example 8. Upstream—Production of Bulk Particle Pool (C)

[1282] One vial of the Sf9 9f4 CB was thawed in a 125 mL shaker flask (37° C. using waterbath, 1-5 minutes until ice crystals dissipate), and then diluted into 20 mL working volume of ESF-AF culture medium. The shaker flask was incubated at 27° C. (100 rpm shaking, 2-inch orbital diameter) in a non-humidified, ambient air, temperature regulated incubator in a first expansion until the cell density was expanded to between 5.0-8.0×10⁶ cells/mL.

[1283] The culture was then seeded and expanded through multiple additional expansion steps using larger shaker flasks, with a target output density of 4.0-5.0×10⁶ cells/mL for each expansion step to allow for a consistent seeding density of 0.5×10⁶ cells/mL in subsequent expansion steps. Expansions were completed at 27° C. for 3-5 days with 100 rpm shaking (≤2 L working volume) or 80 rpm shaking (>2 L working volume).

[1284] The following additional expansions were completed: (i) expansion up to 200 mL working volume in a 1 L flask; (ii) expansion up to 1000 mL working volume in a 3 L flask; and (iii) expansion up to 3000 mL working volume in 5 L flasks.

[1285] 5 L of expanded culture mixture was spiked with 10% w/v Pluronic F-68 (2.045 v/v spike), which was then transferred to a 50 L GE WAVE bioreactor (0.25 mL/min fixed air sparge, oxygen on demand up to 40% dissolved O₂, 20 rpm rocking up to 9° angle) for an additional expansion (3-5 days at 27° C.) up to a 25 L working volume with a target output density of 3.0×10⁶ cells/mL.

[1286] The culture medium was spiked again with 10% w/v Pluronic F-68 (2.5 v/v spike) and then seeded into a Thermofisher 250 L HyPerfonna Bioreactor with a seeding density of 1.0-2.0×10⁶ cells/mL and 125 L working volume (Hyclone SFX Insect Cell Culture Media). The culture medium was expanded in the Bioreactor for 2-3 days (cascading oxygen on demand up to 40% dissolved O₂, 0.25 L/min air sparge, 7 L/min air overlay, 27° C. vessel temp, 65° C. vent heater temp, 60 rpm mixer) up to 2.5-2.75×10⁶ cells/mL in a 200 L working volume.

[1287] The cells in the Bioreactor were then co-infected with Rep/Cap Infection BIICs (1:250k v/v) and Transgene Infection BIICs (1:50k v/v). Infected cells were incubated for 1-2 days and the bulk harvest was collected for lysis and processing through Downstream processing.

[1288] Samples were taken through each of the expansion and bioreaction steps to monitor cell density and viability throughout the upstream process.

### Example 9. Downstream—Cell Lysis

[1289] Chemical Lysis was initiated on the bulk harvest in the Production Bioreactor by adding 0.2 M Arginine HCl (pH 7.5, 11.43% v/v), followed by 10% Triton X-100 surfactant (2.86% v/v, for 0.25% v/v Triton X-100 in final lysis mixture), followed by Benzonase nuclease (Grade I, 99% pure, 10 U/mL), and finally 2 M Tris Base to provide a lysis pH of 6.9-7.1. The lysis mixture was held at 37° C. for 4.0-6.0 hours at 6 W/m³ agitation, until a crude lysate pool was generated. The crude lysate pool was be brought to room temperature and aseptically sampled prior to further processing.

[1290] In one alternative, Chemical Lysis was initiated on the 200 L hulk harvest in the Production Bioreactor by adding 0.2 M Arginine HCl (pH 7.5, 11.43% v/v), followed by 10% Triton X-100 surfactant (5.3% v/v, for 0.5% w/v Triton X-100 in final lysis mixture) to provide a lysis pH of 6.8-7.5. The lysis mixture was held at 27° C. for 4.0-6.0 hours at 6 W/m³ agitation, until a crude lysate pool was generated.

[1291] In one alternative, chemical lysis was initiated on the bulk harvest in the Production Bioreactor (225 L working volume) by adding 2M Tris Base to provide a lysis pH of 6.9-7.1, followed by adding 0.2M Arginine HCl (pH 7.5, 30 kg of 1.18 kg/L), then Sartorius Denarase nuclease (5 U/mL), and finally 20% Triton X-100 surfactant in PBS background (3.25% kg of 1.00 kg/L). The lysis mixture was held at 37° C. for 3-4 hours at 60 rpm agitation, until a crude lysate pool was generated.

[1292] In one alternative, chemical lysis was initiated on the bulk harvest in the Production Bioreactor by adding 10% Triton X-100 surfactant (2.57% v/v spike), followed by Benzonase nuclease (Grade I, 99% pure, 10 U/mL). The lysis mixture was held at 37° C. for 6-12 hours with agitation, until a crude lysate pool was generated.

[1293] In one alternative, 0.5M Arginine or Arginine HCl is used in place of 0.2M Arginine HCl.

### Example 10. Downstream—Depth Filtration

[1294] A crude lysate pool from Chemical Lysis was processed through Depth Filtration using an EMD Millipore Millistak⁺ POD filter (DOFIC media series) (≤250 L/m² load challenge, 150-200 LMH load flux) with a differential pressure of less than 30 psid and an inlet pressure of less than 50 psig. A filter recovery flush using 20 mM sodium phosphate, 350 mM sodium chloride and 0.001% w/v Pluronic F-68 (mixture pH of 7.4) was passed through the depth filter, with the flushed recovery being added to the depth filtered pool.

[1295] In one alternative, the crude lysate, pool from Chemical Lysis was processed through Depth Filtration using an EMD Millipore Millistak⁺ POD filter (COSP media series) (≤250 L/m² load challenge).

[1296] In one alternative, the recovery flush (10-20 L/m² load challenge, 150-200 LMH load flux) used 50 mM sodium phosphate, 350 mM. sodium chloride and 0.001% w/v Pluronic F-68 (mixture pH of 7.4). In one alternative, the recovery flush (9-12 L/m² load challenge) used PBS.

### Example 11. Downstream—0.2 μm Filtration

[1297] A depth filtered pool from Depth Filtration was processed through 0.2 μm Filtration using an EMD Millipore Express SFIC XL10 0.5/0.2 μm filter (≤250 L/m² load challenge, 300 LMH load flux) with a differential pressure of less than 72.5 psid, an inlet pressure of less than 80 psig and a back pressure of less than 29 psig. A filter recovery flush using 20 mM sodium phosphate, 350 mM sodium chloride and 0.001% w/v Pluronic F-68 (mixture pH of 7.4) was passed through the 0.2 μm filter, with the flushed recovery being added to the 0.2 μm filtered pool. The resulting 0.2 μm filtered pool is spiked with 5 M NaCl (7.0-7.5% v/v) and held for 1-2 days to form a clarified lysate pool. The clarified lysate pool was stored at 2-8° C.

[1298] In one alternative, the 0.2 μm Filtration used a Sartorius Sartopore 2XLG, 0.8/0.2 lam filter with a 300 L/m² load challenge. In another alternative, the 0.2 μm Filtration comprised a recovery flush using 50 mM sodium phosphate, 350 mM sodium chloride and 0.001% w/v Pluronic F-68 (mixture pH of 7.4).

### Example 12. Downstream Affinity Chromatograohy

[1299] A clarified lysate pool from Depth Filtration and 0.2 μm Filtration was processed through Affinity Chromatography (AFC) using a GE AVB Sepharose HP column resin (3.0-3.5 L column volume). The column resin was equilibrated (3-7 column volumes (CV), 150 cm/hr) with a mixture of 20 mM sodium phosphate, 350 mM sodium chloride and 0.001% w/v Pluronic F-68 (mixture pH of 7.4′. The column resin was then loaded with the clarified lysate pool (≤5.0×10¹³ VG/mL-r load challenge) at 18-25° C., and then flushed (1-3 CV, 150 cm/hr) with a mixture of 20 mM sodium phosphate, 350 mM sodium chloride and 0.001% w/v Pluronic F-68 (mixture pH of 7.4). This was followed by a first wash of the column resin (5 CV, 150 cm/hr) with a mixture of 20 mM sodium citrate, 1M sodium chloride and 0.001% w/v Pluronic F-68 (mixture pH of 6.0); and a second wash of the column resin (5 CV, 150 cm/hr) with a mixture of 10 mM sodium citrate, 350 sodium chloride and 0.001% w/v Pluronic F-68 (mixture pH of 6.0). The filtered product was then eluted from the column resin (2-3 CV, 150 cm/hr) using a mixture of 20 mM sodium citrate, 350 mM sodium chloride and 0.001% w/v Pluronic F-68 (mixture pH of 3.0), with a target elution pool of 2.5-3.0 CV.

[1300] The resulting elution pool was neutralized with 0.5 M Tris Base and 0.001% w/v Pluronic F-68 (8-12% v/v, target final pH of 8.0). The neutralized elution pool was then processed through 0.2 μm Filtration using an EMI) Millipore Express SHC XL6000 0.5/0.2 filter (≤1000 L/m² load challenge, ≤30 psi, ≤400 L/m²/hr flow rate), resulting in an AFC pool (also referred to as an AVB pool) with a working pool volume of 8.5-9.0 L.

[1301] In one alternative, the clarified lysate pool was spiked with 5 M NaCl (7.53% v/v) before being processed through Affinity Chromatography.

[1302] In one alternative, the column resin was equilibrated (5-7 CV, 150 cm/hr) and flushed (2 CV, 150 cm/hr) with a mixture of 50 mM sodium phosphate, 350 mM sodium chloride and 0.001% w/v Pluronic F-68 (mixture pH of 7.4).

[1303] In one alternative, the column resin was not flushed before the first and second wash steps.

[1304] In one alternative, the resulting elution pool was neutralized with 2 M Tris Base and 0.001% wily Plutonic F-68 (3.0% v/v spike, target final pH of 8.0-8.5).

[1305] In one alternative, the clarified lysate pool was processed through AFC using Poros AAVX or Poros AAV9 resins, with glycine used for elution in place of citrate. In one alternative, the wash solution comprised 150 mM sodium chloride instead of 350 mM sodium chloride. In one alternative, the wash solution comprised 0 mM sodium chloride instead of 350 mM sodium chloride.

[1306] In one alternative, the clarified lysate pool was processed through AFC using Poros AAV9 resins (≤5.0×10¹³ VG/mL-r load challenge, 4-minute residence), with a first wash as disclosed above and a second wash which comprised a mixture of 50 mM sodium citrate, 350 mM sodium chloride and 0.001% w/v Pluronic F-68 (mixture pH of 5.5), followed by an elution mixture which comprised 200 mM glycine (pH 2).

[1307] In one alternative, glycine was used for elution in place of citrate. In one alternative, the wash solution comprised 150 mM sodium chloride instead of 350 mM sodium chloride. In one alternative, the wash solution comprised 0 mM sodium chloride instead of 350 mM sodium chloride.

[1308] In one alternative, the clarified lysate pool was processed through hydrophobic interaction chromatography (HIC) under the following conditions: Target Run Load of 5% bulk AAV drug product in 2M Ammonium Sulfate_{;} 0.001% F68, pH 7; Target Load Challenge of about 2.5-10.0×10¹² vg/mL-r; Equilibration with 2M Ammonium Sulfate, 50 mM Tris, 0.001% F68, pH 7.75; and Elution with 250 mM Ammonium Sulfate, 50 mM Tris, 0.001% F68, pH 7.75. in one alternative, the clarified lysate pool was processed through hydrophobic interaction chromatography (HIC) under the following conditions: Target Run Load of 5% bulk AAV drug product in 1M Ammonium Sulfate, 0.001% F68, pH 7; Target Load Challenge of about 2.5-10.0×10¹² vg/mL-r; Equilibration with 1M Ammonium Sulfate, 50 mM Tris, 0.001% F68, pH 7.75; and Elution with 250 mM Ammonium Sulfate, 50 mM Tris, 0.001% F68, pH 7.75. The HIC resins used were Tosoh PPG 600M, Tosoh Phenyl 650M, Tosoh Butyl 650M, or Toros Benzyl

### Example 13. Downstream—Ion-Exchange Chromatography

[1309] A neutralized AFC/AVB pool was processed through Anion-Exchange Chromatography (AEX) using a Sartorius Sartobind Q Membrane (150 mL membrane volume, bind-and-elute mode). The AEX membrane was equilibrated (20 membrane volumes (MV), 5-7 MV/min) with a first mixture of 20 mM Tris, 2 M sodium chloride and 0.001% w/v Pluronic F-68 (mixture pH of 8.0), and then a second mixture of 20 mM Tris, 100 mM sodium chloride and 0.001% w/v Plutonic F-68 (mixture pH of 8.0). The AFC pool was load adjusted by 1:4 dilution with 300-320% v/v of 20 mM Tris and 0.001% w/v Pluronic F-68 (mixture pH of 8.0), with a target pool conductivity of 10 mS/cm and a target pool pH of 8.0. The AEX membrane system was then loaded with the diluted AFC pool (4.0×10¹³ VG/mL-r load challenge) at 18-25° C. and 5 MV/min. The system was flushed (20 MV, 5 MV/min) with a mixture of 20 mM Tris, 100 mM sodium chloride and 0.001% w/v Pluronic F-68 (mixture pH of 8.0). The product was then eluted from the AEX membrane system (20 MV, 5 MV/min) with a mixture of 20 mM Tris, 220 mM sodium chloride and 0,001% w/v Pluronic F-68 (mixture pH of 8.0), with the entire elution being collected. The AEX elution pool was then processed through 0.2 μm Filtration using an EMD Millipore Express SHCXL150 filter (≤1000 L/m² load challenge, ≤30 psi), resulting in an AEX pool with a working pool volume of 1.5-2.0 L.

[1310] In one alternative, the neutralized AFC/AVB pool was processed through AEX using a Millipore Fractogel TMAE HiCap(m) Flow-Through membrane resin. The AEX membrane was charged and equilibrated (5 CV, 150 cm/hr) with a first mixture of 20 mM Tris, 2 M sodium chloride and 0.001% w/v Pluronic F-68 (mixture pH of 8.0), and then a second mixture of 40 mM Tris, 170 mM sodium chloride and 0.001% w/v Pluronic F-68 (mixture pH of 8.5). The AFC pool was load adjusted by 100-110% v/v spike of 10 mM Tris and 0.001% w/v Pluronic F-68 (mixture pH of 8.0-8.5), with a target pool conductivity of 17 mS/cm (adjusted with 5 M NaCl) and a target pool pH of 8.5 (adjust with 2 M Iris Base), The AEX membrane system was then loaded with the adjusted AFC pool (1.0-5.0×10¹³ VG/mL-r load challenge) at 18-25° C. The system was flushed and eluted (2 CV, 150 cm/hr) with a mixture of 40 mM Tris, 170 mM sodium chloride and 0.001% w/v Pluronic F-68 (mixture pH of 8.5), with the entire elution being collected. The AEX elution pool was then processed through 0.2 μm Filtration using an EMD Millipore Express SHCXL150 filter (≤1000 L/m² load challenge, ≤30 psi), resulting in an AEX pool.

[1311] In one alternative, the neutralized AFC/AVB pool was processed through AEX using a GE Q Sepharose HP membrane resin. The AEX membrane was equilibrated (5-20 MV, 150 cm/hr) with a mixture of 50 mM Bis-Tris Propane, 200 mM sodium chloride and 0.001%) w/v Pluronic F-68 (mixture pH of 9.0). The AFC pool was load adjusted up to a pH of 9.0 with 0.5 mM Bis-Tris Propane and 0.001% w/v Pluronic F-68, followed by 1:1 dilution with 100 mill Bis-Tris Propane, 20 mM sodium chloride and 0.001% w/v Pluronic F-68 (mixture pH of 9.0). The AEX membrane system was then loaded with the diluted AFC pool (≤1.0×10¹⁴ VG/mLr load challenge) at 18-25° C. and 150 cm/hr. The system was flushed and eluted (3 CV, 150 cm/hr) with a mixture of 50 mM Bis-Tris Propane, 200 mM sodium chloride and 0.001% w/v Pluronic F-68 (mixture pH of 9.0). The AEX elution pool was neutralized with a 10% v/v spike of 1 M Iris, 2 M NaCl, and 0.001% (w/v) Pluronic F-68 (mixture pH of pH 7.5). The AEX elution pool was then processed through 0.2 nm Filtration using an EMD Millipore Express SH CXL150 filter (≤1000 L/m² load challenge, ≤30 psi), resulting in an AEX pool.

[1312] In one alternative, the neutralized AFC/AVB pool was processed through AEX using a Sartorius Sartobind STIC Membrane (<2.5 L membrane volume per 250 L batch, bind-and-elute mode, ≤1.0×10¹⁴ VG/mLr load challenge). The system was flushed and eluted with a mixture of 20 mM sodium phosphate, 50 mM sodium chloride, and 0.001% (w/v) Pluronic F-68 (mixture pH of 6.8). In one alternative, the clarified lysate pool from Depth Filtration (Example 10) and 0.2 μm Filtration (Example 11) is processed through AEX prior to being processes through Affinity Chromatography (AFC) (Example 12).

[1313] In one alternative, the neutralized AFC/AVB pool was processed through Cation-Exchange Chromatography (CEX) using a Poros XS membrane resin. The CEX membrane was charged (6-10 CV, 500 cm/hr) with 1 M NaCl, then equilibrated with 20 mM Tris, 100 mM NaCl, and 0.001% (w/v) Pluronic F-68 (mixture pH of pH 8.5). The AFC pool was load adjusted up to a pH of 8.5 with 2 M Tris Base, followed by dilution with WFI water to target pool conductivity of 15 mS/cm, and then followed by the addition of 0.001% w/v of 1% Pluronic F-68. The CEX membrane system was then loaded with the diluted AFC pool (≤1.0×10¹⁴ VG/mL-r load challenge, 3.3-minute residence). The system was washed (6 CV, 3.3 minute residence) with 20 mM Tris and 0.001% (w/v) Pluronic F-68 (mixture pH of 8.5); followed by a first elution (10 CV, ≤500 cm/hr) with 20 mM Tris, 290 mM NaCl, and 0.001% (w/v) Pluronic F-68 (mixture pH of pH 8.5); and then a second elution (10 CV, ≤500 cm/hr) with 20 mM Tris, 305 mM NaCl, and 0.001% (w/v) Pluronic F-68 (mixture pH of pH 8.5), The CEX elution pool was neutralized with 1 M acetic acid to a mixture pH 7.0. The AEX elution pool was then processed through 0.2 p.m Filtration using an EMD Millipore Express SHC XL150 filter (50 L/m² load challenge), resulting in a CEX pool as an AEX pool equivalent.

[1314] In one alternative, the neutralized AFC/AVB pool was processed through AEX using a Poros HQ membrane resin (3.4 mL CV), with a target pool conductivity of 16-20 mS/cm at pH 7.8-8.2. In one alternative, the neutralized AFC/AVB pool was processed through AEX using the following parameters: Targeted Load Challenge of about 1×10¹³ vgs/ml-r, Target Load Conductivity of <5-6 mS/cm, Load pH of 8-10, Elution pH of 8-10 with Sodium Chloride and Sodium Acetate salts. In one alternative, the neutralized AFC/AVB pool was processed through Multimodal Chromatography (MMC) using a Nuvia aPrime 4A membrane using the following parameters: Targeted Load Challenge of about 1×10¹³ vgs/ml-r, Target Load Conductivity of <5-6 mS/cm, Load pH of 8-10, Elution pH of 8-10 with Sodium Chloride and Sodium Acetate salts. In one alternative, the neutralized AFC/AVB pool was processed through AEX or MMC using a pH of 9.5 or higher.

### Example 14. Downstream—TFF Filtration

[1315] A neutralized AEX pool was processed through Tangential Flow Filtration (TFF) using a Spectrum mPES Hollow Fiber TFF system (0.5 mm fiber ID, 100 kDA MWCO, 20-30 L/m² load challenge, 4-5 psi IMP, 2000 sec⁻¹ shear). The TFF system was first rinsed (20 L/m) with WFI water, then sanitized (20 L/m², 45 min hold) with 0.1 M NaOH, then equilibrated (20 L/m²) with an AEX Elution Buffer (pH 8.0) comprising 20 mM Tris, 220 mM sodium chloride, and 0.001% (w/v) Pluronic F-68, with equilibration continuing until both permeate and retentate effluents are at pH 8.0. The AEX pool was processed through Pre-TFF Nanofiltration using an Asahi Kasei Planova 35N filter as a single load, continuous flow process with constant pressure (12.5 L/m² load challenge, 10 psi) to produce a TFF Load pool. The TFF Load pool was spiked (11% v/v) with a 50% sucrose mixture, then processed through a first diafiltration (DF) step (5-6 diafiltration volumes (DV), low shear) using a first diafiltration buffer (high salt, low sucrose) which comprises 10 mM sodium phosphate, 1.5 mM potassium phosphate, 220 mM sodium chloride, 5% w/v Sucrose, and 0.001% (w/v) Poloxamer 188 (buffer pH of 7.5). Diafiltration of the product pool was followed by concentration through ultrafiltration to a target concentration of 7.0×10¹³ VG/mL (confirmed by ddPCR), and then a second diafiltration step (7-8 DV, low shear) using a final formulation buffer (low salt, high sucrose) which comprises 10 mM sodium phosphate (dibasic), 1.5 mM potassium phosphate (monobasic), 100 mM sodium chloride, 7% w/v Sucrose, and 0.001% (w/v) Poloxamer 188 (buffer pH of 7.5). Retentate comprising the product and final formulation buffer was collected into a Final TFF Pool. Viral titer of the Final TFF Pool was analyzed overnight using ddPCR.

[1316] The TFF system was subjected to a Recovery Flush (110% v/v of system holdup, 10 min recirculation) using final formulation buffer (low salt, high sucrose) which comprises 10 mM sodium phosphate (dibasic), 1.5 mM, potassium phosphate (monobasic), 100 mM sodium chloride, 7% w/v Sucrose, and 0.001% (w/v) Poloxamer 188 (buffer pH of 7.5). The Final TFF Recovery Flush is collected separately from the Final TFF Pool. Viral titer of the Final TFF Recovery Flush was analyzed overnight using ddPCR. Final TFF Recovery Flush was added to Final TFF Pool to provide VRF Load Pool with viral concentration of 3.5×10¹³ VG/mL. Additional final formulation buffer (low salt, high sucrose) was added as necessary to achieve target viral concentration for VRF Load Pool.

[1317] In one alternative, the neutralized AEX pool was processed through ITT using a Millipore Pellicon-3 Ultracef PLCTK system (30 kDA MWCO, 2-3 L/m² load challenge). The TFF system was equilibrated (20 L/m², 5-minute contact) with 20 mM Tris, 290 mM sodium chloride, and 0.001% (w/v) Pluronic F-68, with equilibration continuing until both permeate and retentate effluents are at pH 7.0. The TFF Load pool was diluted with 20 mM Iris, 290 mM. sodium chloride, and 0.001% (w/v) Pluronic F-68 to a viral concentration of 2.0-3.0×10¹² VG/mL. The TFF Load pool was not processed through Pre-TFF Nanofiltration, but was instead processed directly into a diafiltration step (6 DV, 5-10 psi TMP, 10-20 psi inlet, 80 LMH) using a diafiltration buffer which comprises 10 mM Sodium Phosphate, 180 mM Sodium Chloride, and 0.001% (w/v) Pluronic F-68 (mixture pH of 7.3). The pool was then concentrated through ultrafiltration (10-20 psi inlet, 80LMH) to a target concentration of 5.0×10¹² VG/mL. Retentate comprising the product and formulation buffer was collected into a Final TFF Pool. The process did not comprise a second diafiltration step or a Recovery Flush.

[1318] In one alternative, the neutralized AEX pool was processed through TFF using a Millipore Ultracel PLCTK system with Pellicon-3 cassette (0.57 in², 30 kDA MWCO, 2-3 L/m² load challenge, 6 psi TMP, 5-10 psi inlet feed). The TFF system was first rinsed (25 L/m²) with WFI water, then sanitized (25 L/m², 45 min hold) with 0.25 M NaOH, then equilibrated (25 L/m²) with an equilibration buffer (pH 8.5) comprising 40 mM Tris, 170 mM sodium chloride, and 0.001% (w/v) Pluronic F-68, with equilibration continuing until both permeate and retentate effluents are at pH 8.5, The IFF Load pool was not processed through Pre-TFF Nanofiltration or a first diafiltration step, but was instead concentrated through ultrafiltration (2.6 L/min) to a target concentration of 5.0×10¹² VG/mL (confirmed by ddPCR), and then a diafiltration step (8 DV, 2.6 L/min) using a diafiltration buffer which comprises 10 mM Sodium Phosphate, 180 mM Sodium Chloride, and 0.001% (w/v) Pluronic F-68 (mixture pH of 7.3). The TFF system was subjected to a Recovery Flush (110% v/v of system holdup, 5-10 min recirculation) using the same diafiltration buffer. The Final TFT Recovery Flush is collected separately from the Final TFT Pool, and each pool is processed separately through 0.2 μm Filtration using an EMD Millipore Express SHCXL150 filter (≤1000 L/m² load challenge, ≤400 L/m²/hr flow rate, ≤30 psi). Filtered TFF Recovery Flush was added to Filtered TFF Pool, and then diluted as needed with diafiltration buffer, to provide VRF Load Pool with viral concentration of 2.0-6.0×10¹² VG/mL.

[1319] In one alternative, the system uses Millipore Ultracel PLCTK system with Pellicon-3 cassette (0.57 m², 30 kDA MWCO, 2-3 L/m² load challenge, 25 psig at feed TMP, 350 LMH, 7 diafiltration volumes, <6.0×10¹⁶ VG/m² load).

[1320] In one alternative, the TFF system was equilibrated (10-15 L/m²) with a mixture of 10 mM sodium phosphate. 2 mM potassium phosphate, 2.7 mM potassium chloride, 192 mM sodium chloride, and 0.001% (w/v) Pluronic F-68 (mixture pH of 7.5). The TFF Load pool was not processed through Pre-TFF Nanofiltration or a first diafiltration step, but was instead concentrated through ultrafiltration (0.5 mm fiber ID, 100 kDA MWCO, 60 L/m² load challenge, 4-5 psi IMP, 4000 sec⁻¹ shear) to a target concentration of 5.0×10¹² VG/mL (confirmed by qPCR), and then a diafiltration step (5 DV, 4-5 psi TMP, 4000 sec⁻¹ shear) using a diafiltration buffer which comprises 10 mM Sodium Phosphate, 2 mM Potassium Phosphate, 2.7 mM Potassium Chloride, 192 mM Sodium Chloride, 0.001% (w/v) Pluronic F-68 (mixture pH of 7.5). The TFF system was subjected to a Recovery Flush (110% v/v of system holdup, 5 min recirculation) using a buffer which comprises 10 mM Sodium Phosphate, 2 mM Potassium Phosphate, 2.7 mM Potassium Chloride, 192 mM Sodium Chloride, and 0.001% (w/v) Pluronic F-68. Final TFF Recovery Flush was added to Final TFF Pool to provide VRF Load Pool with viral concentration of 3.0-5.0×1.0¹² VG/mL.

### Example 15. Downstream—Virus Retentive Filtration

[1321] A VRF Load Pool was processed through Virus Retentive Filtration (VRF) using art Asahi Kasei Planova 35N filter (50.0-100.0 L/m² load challenge, 10 psi) which had been processed through a pre-use flush (10.0 L/m² load challenge, 10 psi) with a formulation buffer of 10 mM sodium phosphate (dibasic), 1.5 mM potassium phosphate (monobasic), 100 mM sodium chloride, 7% w/v Sucrose, and 0.001% (w/v) Poloxamer 188 (buffer pH of 7.5). The VRF filtration was followed by processing through 0.2 μm Filtration using an EMD Millipore Express SHCXL150 filter (≤1000 L/m² load challenge, ≤30 psi), resulting in an VRF pool with a working viral concentration of 3.5-5.0×10¹² VG/mL.

[1322] The VRF pool was then processed through Millipore Final Filtration (FF) using an EMD Millipore Sterile Millipak 0.22 μm (Pre-use flush with formulation buffer, ≥10.0 L/m² load challenge; FF process with ≤1000 L/m² load challenge, 200 LMH load flux, ≤60 psi differential pressure, ≤75 psi inlet pressure) to provide a Drug Substance pool with a working viral concentration of 3.5-5.0×10¹² VG/mL. A portion of the Drug Substance pool was stored for ≤1 month at 2-8° C. in aseptic bioprocess bag closed to atmosphere. A portion of the Drug Substance pool was stored for ≥1 month at ≤−60° C. in aseptic Polypropylene container closed to atmosphere.

[1323] In one alternative, the VRF filter and FF filters are both pre-use-flushed (10 L/m², 240-300 LMH, 14 psi) with WFI water, followed by a second pre-use-flush with 10 sodium phosphate. 180 mM sodium chloride, and 0.001% Pluronic F68 (mixture pH of 7.3).

[1324] In one alternative, the VRF filter is pre-use-flushed (10-20 L/m²) with a mixture of 10 mM sodium phosphate, 2 mM Potassium Phosphate, 2.7 mM Potassium Chloride, 192 mM Sodium Chloride, and 0.001% Pluronic F68 (mixture pH of 7.5).

[1325] In one alternative, the VRF filter is a Millipore NFR filter.

### Example 16. Downstream—Fill and Finish

[1326] A Pooled Drug Substance was transferred to a Biosafety Cabinet (BSC) and filtered through a EMD Millipore Millipak Gamma Gold 0.22 μm filter (dual-in-line sterilizing grade filters, ≤1000 L/m² load challenge, 200 LMH load flux, ≤60 psi differential pressure, ≤75 psi inlet pressure). The filtered Drug Substance pool comprised 10 mM sodium phosphate, 180 mM sodium chloride, and 0.001% Pluronic F68 (mixture pH of 7.3), with a target AAV concentration of 3.0-5.0×10¹² VG/mL. The filtered Drug Substance pool was then aseptically filled into 2 ml Cryovials (1.8 ml fill volume, 1.6 ml extractable) utilizing a programmable Peristaltic dispensing pump within the BSC. Product vials were stoppered, seal capped, 100% visually inspected and labeled (at 25° C.), and then stored at ≤−65° C.

[1327] In one alternative, the Pooled Drug Substance was filtered through a Pall Supor EKV, 0.2 μm sterilizing-grade filter.

The application's sequence listing, which the Patent Office published only in electronic form, follows.

SEQUENCE LISTING (1791 sequences)

SEQ ID NO: 1 - protein, 743 aa, Artificial Sequence
  source: /note="Description of Artificial Sequence: Synthetic polypeptide"
MAADGYLPDWLEDNLSEGIREWWALKPGAPQPKANQQHQDNARGLVLPGYKYLGPGNGLDKGEPVNAADAAALEHDKAYDQQLKAGDNPYLKYNHADAEFQERLKEDTSFGGNLGRAVFQAKKRLLEPLGLVEEAAKTAPGKKRPVEQSPQEPDSSAGIGKSGAQPAKKRLNFGQTGDTESVPDPQPIGEPPAAPSGVGSLTMASGGGAPVADNNEGADGVGSSSGNWHCDSQWLGDRVITTSTRTWALPTYNNHLYKQISNSTSGGSSNDNAYFGYSTPWGYFDFNRFHCHFSPRDWQRLINNNWGFRPKRLNFKLFNIQVKEVTDNNGVKTIANNLTSTVQVFTDSDYQLPYVLGSAHEGCLPPFPADVFMIPQYGYLTLNDGSQAVGRSSFYCLEYFPSQMLRTGNNFQFSYEFENVPFHSSYAHSQSLDRLMNPLIDQYLYYLSKTINGSGQNQQTLKFSVAGPSNMAVQGRNYIPGPSYRQQRVSTTVTQNNNSEFAWPGASSWALNGRNSLMNPGPAMASHKEGEDRFFPLSGSLIFGKQGTGRDNVDADKVMITNEEEIKTTNPVATESYGQVATNHQSDGTLAVPFKAQAQTGWVQNQGILPGMVWQDRDVYLQGPIWAKIPHTDGNFHPSPLMGGFGMKHPPPQILIKNTPVPADPPTAFNKDKLNSFITQYSTGQVSVEIEWELQKENSKRWNPEIQYTSNYYKSNNVEFAVNTEGVYSEPRPIGTRYLTRNL

SEQ ID NO: 2 - protein, 743 aa, Artificial Sequence
  source: /note="Description of Artificial Sequence: Synthetic polypeptide"
MAADGYLPDWLEDNLSEGIREWWALKPGAPQPKANQQHQDNARGLVLPGYKYLGPGNGLDKGEPVNAADAAALEHDKAYDQQLKAGDNPYLKYNHADAEFQERLKEDTSFGGNLGRAVFQAKKRLLEPLGLVEEAAKTAPGKKRPVEQSPQEPDSSAGIGKSGAQPAKKRLNFGQTGDTESVPDPQPIGEPPAAPSGVGSLTMASGGGAPVADNNEGADGVGSSSGNWHCDSQWLGDRVITTSTRTWALPTYNNHLYKQISNSTSGGSSNDNAYFGYSTPWGYFDFNRFHCHFSPRDWQRLINNNWGFRPKRLNFKLFNIQVKEVTDNNGVKTIANNLTSTVQVFTDSDYQLPYVLGSAHEGCLPPFPADVFMIPQYGYLTLNDGSQAVGRSSFYCLEYFPSQMLRTGNNFQFSYEFENVPFHSSYAHSQSLDRLMNPLIDQYLYYLSRTINGSGQNQQTLKFSVAGPSNMAVQGRNYIPGPSYRQQRVSTTVTQNNNSEFAWPGASSWALNGRNSLMNPGPAMASHKEGEDRFFPLSGSLIFGKQGTGRDNVDADKVMITNEEEIKTTNPVATESYGQVATNHQSDGTLAVPFKAQAQTGWVQNQGILPGMVWQDRDVYLQGPIWAKIPHTDGNFHPSPLMGGFGMKHPPPQILIKNTPVPADPPTAFNKDKLNSFITQYSTGQVSVEIEWELQKENSKRWNPEIQYTSNYYKSNNVEFAVNTEGVYSEPRPIGTRYLTRNL

SEQ ID NO: 3 - protein, 743 aa, Artificial Sequence
  source: /note="Description of Artificial Sequence: Synthetic polypeptide"
MAADGYLPDWLEDNLSEGIREWWALKPGAPQPKANQQHQDNARGLVLPGYKYLGPGNGLDKGEPVNAADAAALEHDKAYDQQLKAGDNPYLKYNHADAEFQERLKEDTSFGGNLGRAVFQAKKRLLEPLGLVEEAAKTAPGKKRPVEQSPQEPDSSAGIGKSGAQPAKKRLNFGQTGDTESVPDPQPIGEPPAAPSGVGSLTMASGGGAPVADNNEGADGVGSSSGNWHCDSQWLGDRVITTSTRTWALPTYNNHLYKQISNSTSGGSSNDNAYFGYSTPWGYFDFNRFHCHFSPRDWQRLINNNWGFRPKRLNFKLFNIQVKEVTDNNGVKTIANNLTSTVQVFTDSDYQLPYVLGSAHEGCLPPFPADVFMIPQYGYLTLNDGSQAVGRSSFYCLEYFPSQMLRTGNNFQFSYEFENVPFHSSYAHSQSLDRLMNPLIDQYLYYLSRTINGSGQNQQTLKFSVAGPSNMAVQGRNYIPGPSYRQQRVSTTVTQNNNSEFAWPGASSWALNGRNSLMNPGPAMASHKEGEDRFFPLSGSLIFGKQGTGRDNVDADKVMITNEEEIKTTNPVATESYGQVATNHQSAQTLAVPFKAQAQTGWVQNQGILPGMVWQDRDVYLQGPIWAKIPHTDGNFHPSPLMGGFGMKHPPPQILIKNTPVPADPPTAFNKDKLNSFITQYSTGQVSVEIEWELQKENSKRWNPEIQYTSNYYKSNNVEFAVNTEGVYSEPRPIGTRYLTRNL

SEQ ID NO: 4 - DNA, 2232 bp, Artificial Sequence
  source: /note="Description of Artificial Sequence: Synthetic polynucleotide"
atggctgccgatggttatcttccagattggctcgaggacaaccttagtgaaggaattcgcgagtggtgggctttgaaacctggagcccctcaacccaaggcaaatcaacaacatcaagacaacgctcgaggtcttgtgcttccgggttacaaataccttggacccggcaacggactcgacaagggggagccggtcaacgcagcagacgcggcggccctcgagcacgacaaggcctacgaccagcagctcaaggccggagacaacccgtacctcaagtacaaccacgccgacgccgagttccaggagcggctcaaagaagatacgtcttttgggggcaacctcgggcgagcagtcttccaggccaaaaagaggcttcttgaacctcttggtctggttgaggaagcggctaagacggctcctggaaagaagaggcctgtagagcagtctcctcaggaaccggactcctccgcgggtattggcaaatcgggtgcacagcccgctaaaaagagactcaatttcggtcagactggcgacacagagtcagtcccagaccctcaaccaatcggagaacctcccgcagccccctcaggtgtgggatctcttacaatggcttcaggtggtggcgcaccagtggcagacaataacgaaggtgccgatggagtgggtagttcctcgggaaattggcattgcgattcccaatggctgggggacagagtcatcaccaccagcacccgaacctgggccctgcccacctacaacaatcacctctacaagcaaatctccaacagcacatctggaggatcttcaaatgacaacgcctacttcggctacagcaccccctgggggtattttgacttcaacagattccactgccacttctcaccacgtgactggcagcgactcatcaacaacaactggggattccggcctaagcgactcaacttcaagctcttcaacattcaggtcaaagaggttacggacaacaatggagtcaagaccatcgccaataaccttaccagcacggtccaggtcttcacggactcagactatcagctcccgtacgtgctcgggtcggctcacgagggctgcctcccgccgttcccagcggacgttttcatgattcctcagtacgggtatctgacgcttaatgatggaagccaggccgtgggtcgttcgtccttttactgcctggaatatttcccgtcgcaaatgctaagaacgggtaacaacttccagttcagctacgagtttgagaacgtacctttccatagcagctacgctcacagccaaagcctggaccgactaatgaatccactcatcgaccaatacttgtactatctctctagaactattaacggttctggacagaatcaacaaacgctaaaattcagtgtggccggacccagcaacatggctgtccagggaagaaactacatacctggacccagctaccgacaacaacgtgtctcaaccactgtgactcaaaacaacaacagcgaatttgcttggcctggagcttcttcttgggctctcaatggacgtaatagcttgatgaatcctggacctgctatggccagccacaaagaaggagaggaccgtttctttcctttgtctggatctttaatttttggcaaacaaggtaccggcagagacaacgtggatgcggacaaagtcatgataaccaacgaagaagaaattaaaactactaacccggtagcaacggagtcctatggacaagtggccacaaaccaccagagtgcccaaactttggcggtgccttttaaggcacaggcgcagaccggttgggttcaaaaccaaggaatacttccgggtatggtttggcaggacagagatgtgtacctgcaaggacccatttgggccaaaattcctcacacggacggcaactttcacccttctccgctgatgggagggtttggaatgaagcacccgcctcctcagatcctcatcaaaaacacacctgtacctgcggatcctccaacggccttcaacaaggacaagctgaactctttcatcacccagtattctactggccaagtcagcgtggagatcgagtgggagctgcagaaggaaaacagcaagcgctggaacccggagatccagtacacttccaactattacaagtctaataatgttgaatttgctgttaatactgaaggtgtatatagtgaaccccgccccattggcaccagatacctgactcgtaatctgtaa

SEQ ID NO: 5 - protein, 736 aa, Artificial Sequence
  source: /note="Description of Artificial Sequence: Synthetic polypeptide"
MAADGYLPDWLEDNLSEGIREWWALKPGAPQPKANQQHQDNARGLVLPGYKYLGPGNGLDKGEPVNAADAAALEHDKAYDQQLKAGDNPYLKYNHADAEFQERLKEDTSFGGNLGRAVFQAKKRLLEPLGLVEEAAKTAPGKKRPVEQSPQEPDSSAGIGKSGAQPAKKRLNFGQTGDTESVPDPQPIGEPPAAPSGVGSLTMASGGGAPVADNNEGADGVGSSSGNWHCDSQWLGDRVITTSTRTWALPTYNNHLYKQISNSTSGGSSNDNAYFGYSTPWGYFDFNRFHCHFSPRDWQRLINNNWGFRPKRLNFKLFNIQVKEVTDNNGVKTIANNLTSTVQVFTDSDYQLPYVLGSAHEGCLPPFPADVFMIPQYGYLTLNDGSQAVGRSSFYCLEYFPSQMLRTGNNFQFSYEFENVPFHSSYAHSQSLDRLMNPLIDQYLYYLSRTIQSSQTPRQTLKFSVAGPSNMAVQGRNYIPGPSYRQQRVSTTVTQNNNSEFAWPGASSWALNGRNSLMNPGPAMASHKEGEDRFFPLSGSLIFGKQGTGRDNVDADKVMITNEEEIKTTNPVATESYGQVATNHQSAQAQAQTGWVQNQGILPGMVWQDRDVYLQGPIWAKIPHTDGNFHPSPLMGGFGMKHPPPQILIKNTPVPADPPTAFNKDKLNSFITQYSTGQVSVEIEWELQKENSKRWNPEIQYTSNYYKSNNVEFAVNTEGVYSEPRPIGTRYLTRNL

SEQ ID NO: 6 - protein, 743 aa, Artificial Sequence
  source: /note="Description of Artificial Sequence: Synthetic polypeptide"
MAADGYLPDWLEDNLSEGIREWWALKPGAPQPKANQQHQDNARGLVLPGYKYLGPGNGLDKGEPVNAADAAALEHDKAYDQQLKAGDNPYLKYNHADAEFQERLKEDTSFGGNLGRAVFQAKKRLLEPLGLVEEAAKTAPGKKRPVEQSPQEPDSSAGIGKSGAQPAKKRLNFGQTGDTESVPDPQPIGEPPAAPSGVGSLTMASGGGAPVADNNEGADGVGSSSGNWHCDSQWLGDRVITTSTRTWALPTYNNHLYKQISNSTSGGSSNDNAYFGYSTPWGYFDFNRFHCHFSPRDWQRLINNNWGFRPKRLNFKLFNIQVKEVTDNNGVKTIANNLTSTVQVFTDSDYQLPYVLGSAHEGCLPPFPADVFMIPQYGYLTLNDGSQAVGRSSFYCLEYFPSQMLRTGNNFQFSYEFENVPFHSSYAHSQSLDRLMNPLIDQYLYYLSRTIILGTGTSQTLKFSVAGPSNMAVQGRNYIPGPSYRQQRVSTTVTQNNNSEFAWPGASSWALNGRNSLMNPGPAMASHKEGEDRFFPLSGSLIFGKQGTGRDNVDADKVMITNEEEIKTTNPVATESYGQVATNHQSAQTRTNPEAAQAQTGWVQNQGILPGMVWQDRDVYLQGPIWAKIPHTDGNFHPSPLMGGFGMKHPPPQILIKNTPVPADPPTAFNKDKLNSFITQYSTGQVSVEIEWELQKENSKRWNPEIQYTSNYYKSNNVEFAVNTEGVYSEPRPIGTRYLTRNL

SEQ ID NO: 7 - protein, 743 aa, Artificial Sequence
  source: /note="Description of Artificial Sequence: Synthetic polypeptide"
MAADGYLPDWLEDNLSEGIREWWALKPGAPQPKANQQHQDNARGLVLPGYKYLGPGNGLDKGEPVNAADAAALEHDKAYDQQLKAGDNPYLKYNHADAEFQERLKEDTSFGGNLGRAVFQAKKRLLEPLGLVEEAAKTAPGKKRPVEQSPQEPDSSAGIGKSGAQPAKKRLNFGQTGDTESVPDPQPIGEPPAAPSGVGSLTMASGGGAPVADNNEGADGVGSSSGNWHCDSQWLGDRVITTSTRTWALPTYNNHLYKQISNSTSGGSSNDNAYFGYSTPWGYFDFNRFHCHFSPRDWQRLINNNWGFRPKRLNFKLFNIQVKEVTDNNGVKTIANNLTSTVQVFTDSDYQLPYVLGSAHEGCLPPFPADVFMIPQYGYLTLNDGSQAVGRSSFYCLEYFPSQMLRTGNNFQFSYEFENVPFHSSYAHSQSLDRLMNPLIDQYLYYLSRTIILGTGTSQTLKFSVAGPSNMAVQGRNYIPGPSYRQQRVSTTVTQNNNSEFAWPGASSWALNGRNSLMNPGPAMASHKEGEDRFFPLSGSLIFGKQGTGRDNVDADKVMITNEEEIKTTNPVATESYGQVATNHQSAQNGGTSSSAQAQTGWVQNQGILPGMVWQDRDVYLQGPIWAKIPHTDGNFHPSPLMGGFGMKHPPPQILIKNTPVPADPPTAFNKDKLNSFITQYSTGQVSVEIEWELQKENSKRWNPEIQYTSNYYKSNNVEFAVNTEGVYSEPRPIGTRYLTRNL

SEQ ID NO: 8 - protein, 743 aa, Artificial Sequence
  source: /note="Description of Artificial Sequence: Synthetic polypeptide"
MAADGYLPDWLEDNLSEGIREWWALKPGAPQPKANQQHQDNARGLVLPGYKYLGPGNGLDKGEPVNAADAAALEHDKAYDQQLKAGDNPYLKYNHADAEFQERLKEDTSFGGNLGRAVFQAKKRLLEPLGLVEEAAKTAPGKKRPVEQSPQEPDSSAGIGKSGAQPAKKRLNFGQTGDTESVPDPQPIGEPPAAPSGVGSLTMASGGGAPVADNNEGADGVGSSSGNWHCDSQWLGDRVITTSTRTWALPTYNNHLYKQISNSTSGGSSNDNAYFGYSTPWGYFDFNRFHCHFSPRDWQRLINNNWGFRPKRLNFKLFNIQVKEVTDNNGVKTIANNLTSTVQVFTDSDYQLPYVLGSAHEGCLPPFPADVFMIPQYGYLTLNDGSQAVGRSSFYCLEYFPSQMLRTGNNFQFSYEFENVPFHSSYAHSQSLDRLMNPLIDQYLYYLSRTINGSGQNQQTLKFSVAGPSNMAVQGRNYIPGPSYRQQRVSTTVTQNNNSEFAWPGASSWALNGRNSLMNPGPAMASHKEGEDRFFPLSGSLIFGKQGTGRDNVDADKVMITNEEEIKTTNPVATESYGQVATNHQSAQQAVRTSLAQAQTGWVQNQGILPGMVWQDRDVYLQGPIWAKIPHTDGNFHPSPLMGGFGMKHPPPQILIKNTPVPADPPTAFNKDKLNSFITQYSTGQVSVEIEWELQKENSKRWNPEIQYTSNYYKSNNVEFAVNTEGVYSEPRPIGTRYLTRNL

SEQ ID NO: 9 - protein, 736 aa, Artificial Sequence
  source: /note="Description of Artificial Sequence: Synthetic polypeptide"
MAADGYLPDWLEDNLSEGIREWWALKPGAPQPKANQQHQDNARGLVLPGYKYLGPGNGLDKGEPVNAADAAALEHDKAYDQQLKAGDNPYLKYNHADAEFQERLKEDTSFGGNLGRAVFQAKKRLLEPLGLVEEAAKTAPGKKRPVEQSPQEPDSSAGIGKSGAQPAKKRLNFGQTGDTESVPDPQPIGEPPAAPSGVGSLTMASGGGAPVADNNEGADGVGSSSGNWHCDSQWLGDRVITTSTRTWALPTYNNHLYKQISNSTSGGSSNDNAYFGYSTPWGYFDFNRFHCHFSPRDWQRLINNNWGFRPKRLNFKLFNIQVKEVTDNNGVKTIANNLTSTVQVFTDSDYQLPYVLGSAHEGCLPPFPADVFMIPQYGYLTLNDGSQAVGRSSFYCLEYFPSQMLRTGNNFQFSYEFENVPFHSSYAHSQSLDRLMNPLIDQYLYYLSRTINGSGQNQQTLKFSVAGPSNMAVQGRNYIPGPSYRQQRVSTTVTQNNNSEFAWPGASSWALNGRNSLMNPGPAMASHKEGEDRFFPLSGSLIFGKQGTGRDNVDADKVMITNEEEIKTTNPVATESYGQVATNHQSAQAQAQTGWVQNQGILPGMVWQDRDVYLQGPIWAKIPHTDGNFHPSPLMGGFGMKHPPPQILIKNTPVPADPPTAFNKDKLNSFITQYSTGQVSVEIEWELQKENSKRWNPEIQYTSNYYKSNNVEFAVNTEGVYSEPRPIGTRYLTRNL

SEQ ID NO: 10 - DNA, 2211 bp, Artificial Sequence
  source: /note="Description of Artificial Sequence: Synthetic polynucleotide"
atggctgccgatggttatcttccagattggctcgaggacaacctctctgagggcattcgcgagtggtgggacttgaaacctggagccccgaagcccaaagccaaccagcaaaagcaggacgacggccggggtctggtgcttcctggctacaagtacctcggacccttcaacggactcgacaagggggagcccgtcaacgcggcggacgcagcggccctcgagcacgacaaggcctacgaccagcagctcaaagcgggtgacaatccgtacctgcggtataaccacgccgacgccgagtttcaggagcgtctgcaagaagatacgtcttttgggggcaacctcgggcgagcagtcttccaggccaagaagcgggttctcgaacctctcggtctggttgaggaaggcgctaagacggctcctggaaagaaacgtccggtagagcagtcgccacaagagccagactcctcctcgggcatcggcaagacaggccagcagcccgctaaaaagagactcaattttggtcagactggcgactcagagtcagtccccgatccacaacctctcggagaacctccagcaacccccgctgctgtgggacctactacaatggcttcaggcggtggcgcaccaatggcagacaataacgaaggcgccgacggagtgggtaatgcctcaggaaattggcattgcgattccacatggctgggcgacagagtcatcaccaccagcacccgcacctgggccttgcccacctacaataaccacctctacaagcaaatctccagtgcttcaacgggggccagcaacgacaaccactacttcggctacagcaccccctgggggtattttgatttcaacagattccactgccacttttcaccacgtgactggcagcgactcatcaacaacaattggggattccggcccaagagactcaacttcaaactcttcaacatccaagtcaaggaggtcacgacgaatgatggcgtcacaaccatcgctaataaccttaccagcacggttcaagtcttctcggactcggagtaccagcttccgtacgtcctcggctctgcgcaccagggctgcctccctccgttcccggcggacgtgttcatgattccgcaatacggctacctgacgctcaacaatggcagccaagccgtgggacgttcatccttttactgcctggaatatttcccttctcagatgctgagaacgggcaacaactttaccttcagctacacctttgaggaagtgcctttccacagcagctacgcgcacagccagagcctggaccggctgatgaatcctctcatcgaccaatacctgtattacctgaacagaactcaaaatcagtccggaagtgcccaaaacaaggacttgctgtttagccgtgggtctccagctggcatgtctgttcagcccaaaaactggctacctggaccctgttatcggcagcagcgcgtttctaaaacaaaaacagacaacaacaacagcaattttacctggactggtgcttcaaaatataacctcaatgggcgtgaatccatcatcaaccctggcactgctatggcctcacacaaagacgacgaagacaagttctttcccatgagcggtgtcatgatttttggaaaagagagcgccggagcttcaaacactgcattggacaatgtcatgattacagacgaagaggaaattaaagccactaaccctgtggccaccgaaagatttgggaccgtggcagtcaatttccagagcagcagcacagaccctgcgaccggagatgtgcatgctatgggagcattacctggcatggtgtggcaagatagagacgtgtacctgcagggtcccatttgggccaaaattcctcacacagatggacactttcacccgtctcctcttatgggcggctttggactcaagaacccgcctcctcagatcctcatcaaaaacacgcctgttcctgcgaatcctccggcggagttttcagctacaaagtttgcttcattcatcacccaatactccacaggacaagtgagtgtggaaattgaatgggagctgcagaaagaaaacagcaagcgctggaatcccgaagtgcagtacacatccaattatgcaaaatctgccaacgttgattttactgtggacaacaatggactttatactgagcctcgccccattggcacccgttaccttacccgtcccctgtaa

SEQ ID NO: 11 - protein, 736 aa, Adeno-associated virus 1
MAADGYLPDWLEDNLSEGIREWWDLKPGAPKPKANQQKQDDGRGLVLPGYKYLGPFNGLDKGEPVNAADAAALEHDKAYDQQLKAGDNPYLRYNHADAEFQERLQEDTSFGGNLGRAVFQAKKRVLEPLGLVEEGAKTAPGKKRPVEQSPQEPDSSSGIGKTGQQPAKKRLNFGQTGDSESVPDPQPLGEPPATPAAVGPTTMASGGGAPMADNNEGADGVGNASGNWHCDSTWLGDRVITTSTRTWALPTYNNHLYKQISSASTGASNDNHYFGYSTPWGYFDFNRFHCHFSPRDWQRLINNNWGFRPKRLNFKLFNIQVKEVTTNDGVTTIANNLTSTVQVFSDSEYQLPYVLGSAHQGCLPPFPADVFMIPQYGYLTLNNGSQAVGRSSFYCLEYFPSQMLRTGNNFTFSYTFEEVPFHSSYAHSQSLDRLMNPLIDQYLYYLNRTQNQSGSAQNKDLLFSRGSPAGMSVQPKNWLPGPCYRQQRVSKTKTDNNNSNFTWTGASKYNLNGRESIINPGTAMASHKDDEDKFFPMSGVMIFGKESAGASNTALDNVMITDEEEIKATNPVATERFGTVAVNFQSSSTDPATGDVHAMGALPGMVWQDRDVYLQGPIWAKIPHTDGHFHPSPLMGGFGLKNPPPQILIKNTPVPANPPAEFSATKFASFITQYSTGQVSVEIEWELQKENSKRWNPEVQYTSNYAKSANVDFTVDNNGLYTEPRPIGTRYLTRPL

SEQ ID NO: 12 - DNA, 4718 bp, Adeno-associated virus serotype 1
ttgcccactccctctctgcgcgctcgctcgctcggtggggcctgcggaccaaaggtccgcagacggcagagctctgctctgccggccccaccgagcgagcgagcgcgcagagagggagtgggcaactccatcactaggggtaatcgcgaagcgcctcccacgctgccgcgtcagcgctgacgtaaattacgtcataggggagtggtcctgtattagctgtcacgtgagtgcttttgcgacattttgcgacaccacgtggccatttagggtatatatggccgagtgagcgagcaggatctccattttgaccgcgaaatttgaacgagcagcagccatgccgggcttctacgagatcgtgatcaaggtgccgagcgacctggacgagcacctgccgggcatttctgactcgtttgtgagctgggtggccgagaaggaatgggagctgcccccggattctgacatggatctgaatctgattgagcaggcacccctgaccgtggccgagaagctgcagcgcgacttcctggtccaatggcgccgcgtgagtaaggccccggaggccctcttctttgttcagttcgagaagggcgagtcctacttccacctccatattctggtggagaccacgggggtcaaatccatggtgctgggccgcttcctgagtcagattagggacaagctggtgcagaccatctaccgcgggatcgagccgaccctgcccaactggttcgcggtgaccaagacgcgtaatggcgccggaggggggaacaaggtggtggacgagtgctacatccccaactacctcctgcccaagactcagcccgagctgcagtgggcgtggactaacatggaggagtatataagcgcctgtttgaacctggccgagcgcaaacggctcgtggcgcagcacctgacccacgtcagccagacccaggagcagaacaaggagaatctgaaccccaattctgacgcgcctgtcatccggtcaaaaacctccgcgcgctacatggagctggtcgggtggctggtggaccggggcatcacctccgagaagcagtggatccaggaggaccaggcctcgtacatctccttcaacgccgcttccaactcgcggtcccagatcaaggccgctctggacaatgccggcaagatcatggcgctgaccaaatccgcgcccgactacctggtaggccccgctccgcccgcggacattaaaaccaaccgcatctaccgcatcctggagctgaacggctacgaacctgcctacgccggctccgtctttctcggctgggcccagaaaaggttcgggaagcgcaacaccatctggctgtttgggccggccaccacgggcaagaccaacatcgcggaagccatcgcccacgccgtgcccttctacggctgcgtcaactggaccaatgagaactttcccttcaatgattgcgtcgacaagatggtgatctggtgggaggagggcaagatgacggccaaggtcgtggagtccgccaaggccattctcggcggcagcaaggtgcgcgtggaccaaaagtgcaagtcgtccgcccagatcgaccccacccccgtgatcgtcacctccaacaccaacatgtgcgccgtgattgacgggaacagcaccaccttcgagcaccagcagccgttgcaggaccggatgttcaaatttgaactcacccgccgtctggagcatgactttggcaaggtgacaaagcaggaagtcaaagagttcttccgctgggcgcaggatcacgtgaccgaggtggcgcatgagttctacgtcagaaagggtggagccaacaaaagacccgcccccgatgacgcggataaaagcgagcccaagcgggcctgcccctcagtcgcggatccatcgacgtcagacgcggaaggagctccggtggactttgccgacaggtaccaaaacaaatgttctcgtcacgcgggcatgcttcagatgctgtttccctgcaagacatgcgagagaatgaatcagaatttcaacatttgcttcacgcacgggacgagagactgttcagagtgcttccccggcgtgtcagaatctcaaccggtcgtcagaaagaggacgtatcggaaactctgtgccattcatcatctgctggggcgggctcccgagattgcttgctcggcctgcgatctggtcaacgtggacctggatgactgtgtttctgagcaataaatgacttaaaccaggtatggctgccgatggttatcttccagattggctcgaggacaacctctctgagggcattcgcgagtggtgggacttgaaacctggagccccgaagcccaaagccaaccagcaaaagcaggacgacggccggggtctggtgcttcctggctacaagtacctcggacccttcaacggactcgacaagggggagcccgtcaacgcggcggacgcagcggccctcgagcacgacaaggcctacgaccagcagctcaaagcgggtgacaatccgtacctgcggtataaccacgccgacgccgagtttcaggagcgtctgcaagaagatacgtcttttgggggcaacctcgggcgagcagtcttccaggccaagaagcgggttctcgaacctctcggtctggttgaggaaggcgctaagacggctcctggaaagaaacgtccggtagagcagtcgccacaagagccagactcctcctcgggcatcggcaagacaggccagcagcccgctaaaaagagactcaattttggtcagactggcgactcagagtcagtccccgatccacaacctctcggagaacctccagcaacccccgctgctgtgggacctactacaatggcttcaggcggtggcgcaccaatggcagacaataacgaaggcgccgacggagtgggtaatgcctcaggaaattggcattgcgattccacatggctgggcgacagagtcatcaccaccagcacccgcacctgggccttgcccacctacaataaccacctctacaagcaaatctccagtgcttcaacgggggccagcaacgacaaccactacttcggctacagcaccccctgggggtattttgatttcaacagattccactgccacttttcaccacgtgactggcagcgactcatcaacaacaattggggattccggcccaagagactcaacttcaaactcttcaacatccaagtcaaggaggtcacgacgaatgatggcgtcacaaccatcgctaataaccttaccagcacggttcaagtcttctcggactcggagtaccagcttccgtacgtcctcggctctgcgcaccagggctgcctccctccgttcccggcggacgtgttcatgattccgcaatacggctacctgacgctcaacaatggcagccaagccgtgggacgttcatccttttactgcctggaatatttcccttctcagatgctgagaacgggcaacaactttaccttcagctacacctttgaggaagtgcctttccacagcagctacgcgcacagccagagcctggaccggctgatgaatcctctcatcgaccaatacctgtattacctgaacagaactcaaaatcagtccggaagtgcccaaaacaaggacttgctgtttagccgtgggtctccagctggcatgtctgttcagcccaaaaactggctacctggaccctgttatcggcagcagcgcgtttctaaaacaaaaacagacaacaacaacagcaattttacctggactggtgcttcaaaatataacctcaatgggcgtgaatccatcatcaaccctggcactgctatggcctcacacaaagacgacgaagacaagttctttcccatgagcggtgtcatgatttttggaaaagagagcgccggagcttcaaacactgcattggacaatgtcatgattacagacgaagaggaaattaaagccactaaccctgtggccaccgaaagatttgggaccgtggcagtcaatttccagagcagcagcacagaccctgcgaccggagatgtgcatgctatgggagcattacctggcatggtgtggcaagatagagacgtgtacctgcagggtcccatttgggccaaaattcctcacacagatggacactttcacccgtctcctcttatgggcggctttggactcaagaacccgcctcctcagatcctcatcaaaaacacgcctgttcctgcgaatcctccggcggagttttcagctacaaagtttgcttcattcatcacccaatactccacaggacaagtgagtgtggaaattgaatgggagctgcagaaagaaaacagcaagcgctggaatcccgaagtgcagtacacatccaattatgcaaaatctgccaacgttgattttactgtggacaacaatggactttatactgagcctcgccccattggcacccgttaccttacccgtcccctgtaattacgtgttaatcaataaaccggttgattcgtttcagttgaactttggtctcctgtccttcttatcttatcggttaccatggttatagcttacacattaactgcttggttgcgcttcgcgataaaagacttacgtcatcgggttacccctagtgatggagttgcccactccctctctgcgcgctcgctcgctcggtggggcctgcggaccaaaggtccgcagacggcagagctctgctctgccggccccaccgagcgagcgagcgcgcagagagggagtgggcaa

SEQ ID NO: 13 - DNA, 3131 bp, Artificial Sequence
  source: /note="Description of Artificial Sequence: Synthetic polynucleotide"
gcggccgcgaattcgcccttggctgcgtcaactggaccaatgagaactttcccttcaatgattgcgtcgacaagatggtgatctggtgggaggagggcaagatgacggccaaggtcgtggagtccgccaaggccattctcggcggcagcaaggtgcgcgtggaccaaaagtgcaagtcgtccgcccagatcgaccccacccccgtgatcgtcacctccaacaccaacatgtgcgccgtgattgacgggaacagcaccaccttcgagcaccagcagcctctccaggaccggatgtttaagttcgaactcacccgccgtctggagcacgactttggcaaggtgacaaagcaggaagtcaaagagttcttccgctgggccagtgatcacgtgaccgaggtggcgcatgagttttacgtcagaaagggcggagccagcaaaagacccgcccccgatgacgcggataaaagcgagcccaagcgggcctgcccctcagtcgcggatccatcgacgtcagacgcggaaggagctccggtggactttgccgacaggtaccaaaacaaatgttctcgtcacgcgggcatgcttcagatgctgtttccctgcaaaacgtgcgagagaatgaatcggaatttcaacatttgcttcacacacggggtcagagactgctcagagtgtttccccggcgtgtcagaatctcaaccggtcgtcagaaagaggacgtatcggaaactccgtgcgattcatcatctgctggggcgggctcccgagattgcttgctcggcctgcgatctggtcaacgtggacctggatgactgtgtttctgagcaataaatgacttaaaccaggtatggctgccgatggttatcttccagattggctcgaggacaacctctctgagggcattcgcgagtggtgggcgctgaaacctggagccccgaagcccaaagccaaccagcaaaagcaggacgacggccggggtctggtgcttcctggctacaagtacctcggacccttcaacggactcgacaagggggagcccgtcaacgcggcggacgcagcggccctcgagcacgacaaggcttacgaccagcagctgcaggcgggtgacaatccgtacctgcggtataaccacgccgacgccgagtttcaggagcgtctgcaagaagatacgtcttttgggggcaacctcgggcgagcagtcttccaggccaagaagcgggttctcgaacctctcggtctggttgaggaaggcgctaagacggctcctggaaagaagagaccggtagagccatcaccccagcgttctccagactcctctacgggcatcggcaagaaaggccaacagcccgccagaaaaagactcaattttggtcagactggcgactcagagtcagttccagaccctcaacctctcggagaacctccagcagcgccctctggtgtgggacctaatacaatggctgcaggcggtggcgcaccaatggcagacaataacgaaggcgccgacggagtgggtagttcctcgggaaattggcattgcgattccacatggctgggcgacagagtcatcaccaccagcacccgaacctgggccctgcccacctacaacaaccacctctacaagcaaatctccaacgggacatcgggaggagccaccaacgacaacacctacttcggctacagcaccccctgggggtattttgactttaacagattccactgccacctttcaccacgtgactggcagcgactcatcaacaacaactggggattccgacccaagagactcagcttcaagctcttcaacatccaggtcaaggaggtcacgcagaatgaaggcaccaagaccatcgccaataacctcaccagcaccatccaggtgtttacggactcggagtaccagctgccgtacgttctcggctctgtccaccagggctgcctgcctccgttcccggcggacgtgttcatgattccccagtacggctacctaacactcaacaacggtagtcaggccgtgggacgctcctccttctactgcctggaatactttccttcgcagatgctgagaaccggcaacaacttccagtttacttacaccttcgaggacgtgcctttccacagcagctacgcccacagctagagcttggaccggctgatgaatcctctgattgaccagtacctgtactacttgtctcggactcaaacaacaggaggcacggcaaatacgcagactctgggcttcagccaaggtgggcctaatacaatggccaatcaggcaaagaactggctgccaggaccctgttaccgccaacaacgcgtctcaacgacaaccgggcaaaacaacaatagcaactttgcctggactgctgggaccaaataccatctgaatggaagaaattcattggctaatcctggcatcgctatggcaacacacaaagacgacgaggagcgtttttttcccagtaacgggatcctgatttttggcaaacaaaatgctgccagagacaatgcggattacagcgatgtcatgctcaccagcgaggaagaaatcaaaaccactaaccctgtggctacagaggaatacggtatcgtggcagataacttgcagcagcaaaacacggctcctcaaattggaactgtcaacagccagggggccttacccggtatggtctggcagaaccgggacgtgtacctgcagggtcccatctgggccaagattcctcacacggacggcaacttccacccgtctccgctgatgggcggctttggcctgaaacatcctccgcctcagatcctgatcaagaacacgcctgtacctgcggatcctccgaccaccttcaaccagtcaaagctgaactctttcatcacgcaatacagcaccggacaggtcagcgtggaaattgaatgggagctgcagaaggaaaacagcaagcgctggaaccccgagatccagtacacctccaactactacaaatctataagtgtggactttgctgttaatacagaaggcgtgtactctgaaccccgccccattggcacccgttacctcacccgtaatctgtaattgcctgttaatcaataaaccggttgattcgtttcagttgaactttggtctctgcgaagggcgaattc

SEQ ID NO: 14 - DNA, 255 bp, Adeno-associated virus serotype 10
ggtaattcctccggaaattggcattgcgattccacatggctgggcgacagagtcatcaccaccagcacccgaacctgggtcctgcccacctacaacaaccacatctacaagcaaatctccagcgagacaggagccaccaacgacaaccactacttcggctacagcaccccctgggggtattttgactttaacagattccactgccacttttcaccacgtgactggcagcgactcatcaacaacaactggggattc

SEQ ID NO: 15 - protein, 738 aa, Adeno-associated virus 10
MAADGYLPDWLEDNLSEGIREWWDLKPGAPKPKANQQKQDDGRGLVLPGYKYLGPFNGLDKGEPVNAADAAALEHDKAYDQQLKAGDNPYLRYNHADAEFQERLQEDTSFGGNLGRAVFQAKKRVLEPLGLVEEAAKTAPGKKRPVEPSPQRSPDSSTGIGKKGQQPAKKRLNFGQTGESESVPDPQPIGEPPAGPSGLGSGTMAAGGGAPMADNNEGADGVGSSSGNWHCDSTWLGDRVITTSTRTWALPTYNNHLYKQISNGTSGGSTNDNTYFGYSTPWGYFDFNRFHCHFSPRDWQRLINNNWGFRPKRLSFKLFNIQVKEVTQNEGTKTIANNLTSTIQVFTDSEYQLPYVLGSAHQGCLPPFPADVFMIPQYGYLTLNNGSQAVGRSSFYCLEYFPSQMLRTGNNFEFSYTFEDVPFHSSYAHSQSLDRLMNPLIDQYLYYLSRTQSTGGTQGTQQLLFSQAGPANMSAQAKNWLPGPCYRQQRVSTTLSQNNNSNFAWTGATKYHLNGRDSLVNPGVAMATHKDDEERFFPSSGVLMFGKQGAGRDNVDYSSVMLTSEEEIKTTNPVATEQYGVVADNLQQANTGPIVGNVNSQGALPGMVWQNRDVYLQGPIWAKIPHTDGNFHPSPLMGGFGLKHPPPQILIKNTPVPADPPTTFSQAKLASFITQYSTGQVSVEIEWELQKENSKRWNPEIQYTSNYYKSTNVDFAVNTEGTYSEPRPIGTRYLTRNL

SEQ ID NO: 16 - protein, 738 aa, Adeno-associated virus 10
MAADGYLPDWLEDNLSEGIREWWDLKPGAPKPKANQQKQDDGRGLVLPGYKYLGPFNGLDKGEPVNAADAAALEHDKAYDQQLKAGDNPYLRYNHADAEFQERLQEDTSFGGNLGRAVFQAKKRVLEPLGLVEEGAKTAPGKKRPVEPSPQRSPDSSTGIGKKGQQPAKKRLNFGQTGDSESVPDPQPIGEPPAGPSGLGSGTMAAGGGAPMADNNEGADGVGSSSGNWHCDSTWLGDRVITTSTRTWALPTYNNHLYKQISNGTSGGSTNDNTYFGYSTPWGYFDFNRFHCHFSPRDWQRLINNNWGFRPKRLNFKLFNIQVKEVTQNEGTKTIANNLTSTIQVFTDSEYQLPYVLGSAHQGCLPPFPADVFMIPQYGYLTLNNGSQAVGRSSFYCLEYFPSQMLRTGNNFEFSYQFEDVPFHSSYAHSQSLDRLMNPLIDQYLYYLSRTQSTGGTAGTQQLLFSQAGPNNMSAQAKNWLPGPCYRQQRVSTTLSQNNNSNFAWTGATKYHLNGRDSLVNPGVAMATHKDDEERFFPSSGVLMFGKQGAGKDNVDYSSVMLTSEEEIKTTNPVATEQYGVVADNLQQQNAAPIVGAVNSQGALPGMVWQNRDVYLQGPIWAKIPHTDGNFHPSPLMGGFGLKHPPPQILIKNTPVPADPPTTFSQAKLASFITQYSTGQVSVEIEWELQKENSKRWNPEIQYTSNYYKSTNVDFAVNTDGTYSEPRPIGTRYLTRNL

SEQ ID NO: 17 - DNA, 258 bp, Adeno-associated virus serotype 11
ggtaattcctccggaaattggcattgcgattccacatggctgggcgacagagtcatcaccaccagcacccgaacctgggccctgccaacctacaacaaccacctctacaaacaaatctccagcgcttcaacgggggccagcaacgacaaccactactttggctacagcaccccctgggggtattttgactttaacagattccactgccacttctcaccacgtgactggcagcgactcatcaacaacaactggggattc

SEQ ID NO: 18 - DNA, 255 bp, Adeno-associated virus serotype 12
ggtaattcctccggaaattggcattgcgattccacatggctgggcgaccgagtcattaccaccagcacccggacttgggccctgcccacctacaacaaccacctctacaagcaaatctccagccaatcgggtgccaccaacgacaaccactacttcggctacagcaccccttgggggtattttgatttcaacagattccactgccatttctcaccacgtgactggcagcgactcatcaacaacaactggggattc

SEQ ID NO: 19 - DNA, 2208 bp, Adeno-associated virus serotype 2
atggctgccgatggttatcttccagattggctcgaggacactctctctgaaggaataagacagtggtggaagctcaaacctggcccaccaccaccaaagcccgcagagcggcataaggacgacagcaggggtcttgtgcttcctgggtacaagtacctcggacccttcaacggactcgacaagggagagccggtcaacgaggcagacgccgcggccctcgagcacgacaaagcctacgaccggcagctcgacagcggagacaacccgtacctcaagtacaaccacgccgacgcggagtttcaggagcgccttaaagaagatacgtcttttgggggcaacctcggacgagcagtcttccaggcgaaaaagagggttcttgaacctctgggcctggttgaggaacctgttaagacggctccgggaaaaaagaggccggtagagcactctcctgtggagccagactcctcctcgggaaccggaaaggcgggccagcagcctgcaagaaaaagattgaattttggtcagactggagacgcagactcagtacctgacccccagcctctcggacagccaccagcagccccctctggtctgggaactaatacgatggctacaggcagtggcgcaccaatggcagacaataacgagggcgccgacggagtgggtaattcctcgggaaattggcattgcgattccacatggatgggcgacagagtcatcaccaccagcacccgaacctgggccctgcccacctacaacaaccacctctacaaacaaatttccagccaatcaggagcctcgaacgacaatcactactttggctacagcaccccttgggggtattttgacttcaacagattccactgccacttttcaccacgtgactggcaaagactcatcaacaacaactggggattccgacccaagagactcaacttcaagctctttaacattcaagtcaaagaggtcacgcagaatgacggtacgacgacgattgccaataaccttaccagcacggttcaggtgtttactgactcggagtaccagctcccgtacgtcctcggctcggcgcatcaaggatgcctcccgccgttcccagcagacgtcttcatggtgccacagtatggatacctcaccctgaacaacgggagtcaggcagtaggacgctcttcattttactgcctggagtactttccttctcagatgctgcgtaccggaaacaactttaccttcagctacacttttgaggacgttcctttccacagcagctacgctcacagccagagtctggaccgtctcatgaatcctctcatcgaccagtacctgtattacttgagcagaacaaacactccaagtggaaccaccacgcagtcaaggcttcagttttctcaggccggagcgagtgacattcgggaccagtctaggaactggcttcctggaccctgttaccgccagcagcgagtatcaaagacatctgcggataacaacaacagtgaatactcgtggactggagctaccaagtaccacctcaatggcagagactctctggtgaatccgggcccggccatggcaagccacaaggacgatgaagaaaagttttttcctcagagcggggttctcatctttgggaagcaaggctcagagaaaacaaatgtggacattgaaaaggtcatgattacagacgaagaggaaatcaggacaaccaatcccgtggctacggagcagtatggttctgtatctaccaacctccagagaggcaacagacaagcagctaccgcagatgtcaacacacaaggcgttcttccaggcatggtctggcaggacagagatgtgtaccttcaggggcccatctgggcaaagattccacacacggacggacattttcacccctctcccctcatgggtggattcggacttaaacaccctcctccacagattctcatcaagaacaccccggtacctgcgaatccttcgaccaccttcagtgcggcaaagtttgcttccttcatcacacagtactccacgggacaggtcagcgtggagatcgagtgggagctgcagaaggaaaacagcaaacgctggaatcccgaaattcagtacacttccaactacaacaagtctgttaatgtggactttactgtggacactaatggcgtgtattcagagcctcgccccattggcaccagatacctgactcgtaatctgtaa

SEQ ID NO: 20 - protein, 735 aa, Adeno-associated virus 2 [sequence omitted]

SEQ ID NO: 21 - protein, 621 aa, Adeno-associated virus 2
MPGFYEIVIKVPSDLDGHLPGISDSFVNWVAEKEWELPPDSDMDLNLIEQAPLTVAEKLQRDFLTEWRRVSKAPEALFFVQFEKGESYFHMHVLVETTGVKSMVLGRFLSQIREKLIQRIYRGIEPTLPNWFAVTKTRNGAGGGNKVVDECYIPNYLLPKTQPELQWAWTNMEQYLSACLNLTERKRLVAQHLTHVSQTQEQNKENQNPNSDAPVIRSKTSARYMELVGWLVDKGITSEKQWIQEDQASYISFNAASNSRSQIKAALDNAGKIMSLTKTAPDYLVGQQPVEDISSNRIYKILELNGYDPQYAASVFLGWATKKFGKRNTIWLFGPATTGKTNIAEAIAHTVPFYGCVNWTNENFPFNDCVDKMVIWWEEGKMTAKVVESAKAILGGSKVRVDQKCKSSAQIDPTPVIVTSNTNMCAVIDGNSTTFEHQQPLQDRMFKFELTRRLDHDFGKVTKQEVKDFFRWAKDHVVEVEHEFYVKKGGAKKRPAPSDADISEPKRVRESVAQPSTSDAEASINYADRYQNKCSRHVGMNLMLFPCRQCERMNQNSNICFTHGQKDCLECFPVSESQPVSVVKKAYQKLCYIHHIMGKVPDACTACDLVNVDLDDCIFEQ

SEQ ID NO: 22 - DNA, 4675 bp, Adeno-associated virus serotype 2
ttggccactccctctctgcgcgctcgctcgctcactgaggccgggcgaccaaaggtcgcccgacgcccgggctttgcccgggcggcctcagtgagcgagcgagcgcgcagagagggagtggccaactccatcactaggggttcctggaggggtggagtcgtgacgtgaattacgtcatagggttagggaggtcctgtattagaggtcacgtgagtgttttgcgacattttgcgacaccatgtggtcacgctgggtatttaagcccgagtgagcacgcagggtctccattttgaagcgggaggtttgaacgcgcagccgccatgccggggttttacgagattgtgattaaggtccccagcgaccttgacgggcatctgcccggcatttctgacagctttgtgaactgggtggccgagaaggaatgggagttgccgccagattctgacatggatctgaatctgattgagcaggcacccctgaccgtggccgagaagctgcagcgcgactttctgacggaatggcgccgtgtgagtaaggccccggaggcccttttctttgtgcaatttgagaagggagagagctacttccacatgcacgtgctcgtggaaaccaccggggtgaaatccatggttttgggacgtttcctgagtcagattcgcgaaaaactgattcagagaatttaccgcgggatcgagccgactttgccaaactggttcgcggtcacaaagaccagaaatggcgccggaggcgggaacaaggtggtggatgagtgctacatccccaattacttgctccccaaaacccagcctgagctccagtgggcgtggactaatatggaacagtatttaagcgcctgtttgaatctcacggagcgtaaacggttggtggcgcagcatctgacgcacgtgtcgcagacgcaggagcagaacaaagagaatcagaatcccaattctgatgcgccggtgatcagatcaaaaacttcagccaggtacatggagctggtcgggtggctcgtggacaaggggattacctcggagaagcagtggatccaggaggaccaggcctcatacatctccttcaatgcggcctccaactcgcggtcccaaatcaaggctgccttggacaatgcgggaaagattatgagcctgactaaaaccgcccccgactacctggtgggccagcagcccgtggaggacatttccagcaatcggatttataaaattttggaactaaacgggtacgatccccaatatgcggcttccgtctttctgggatgggccacgaaaaagttcggcaagaggaacaccatctggctgtttgggcctgcaactaccgggaagaccaacatcgcggaggccatagcccacactgtgcccttctacgggtgcgtaaactggaccaatgagaactttcccttcaacgactgtgtcgacaagatggtgatctggtgggaggaggggaagatgaccgccaaggtcgtggagtcggccaaagccattctcggaggaagcaaggtgcgcgtggaccagaaatgcaagtcctcggcccagatagacccgactcccgtgatcgtcacctccaacaccaacatgtgcgccgtgattgacgggaactcaacgaccttcgaacaccagcagccgttgcaagaccggatgttcaaatttgaactcacccgccgtctggatcatgactttgggaaggtcaccaagcaggaagtcaaagactttttccggtgggcaaaggatcacgtggttgaggtggagcatgaattctacgtcaaaaagggtggagccaagaaaagacccgcccccagtgacgcagatataagtgagcccaaacgggtgcgcgagtcagttgcgcagccatcgacgtcagacgcggaagcttcgatcaactacgcagacaggtaccaaaacaaatgttctcgtcacgtgggcatgaatctgatgctgtttccctgcagacaatgcgagagaatgaatcagaattcaaatatctgcttcactcacggacagaaagactgtttagagtgctttcccgtgtcagaatctcaacccgtttctgtcgtcaaaaaggcgtatcagaaactgtgctacattcatcatatcatgggaaaggtgccagacgcttgcactgcctgcgatctggtcaatgtggatttggatgactgcatctttgaacaataaatgatttaaatcaggtatggctgccgatggttatcttccagattggctcgaggacactctctctgaaggaataagacagtggtggaagctcaaacctggcccaccaccaccaaagcccgcagagcggcataaggacgacagcaggggtcttgtgcttcctgggtacaagtacctcggacccttcaacggactcgacaagggagagccggtcaacgaggcagacgccgcggccctcgagcacgtacaaagcctacgaccggcagctcgacagcggagacaacccgtacctcaagtacaaccacgccgacgcggagtttcaggagcgccttaaagaagatacgtcttttgggggcaacctcggacgagcagtcttccaggcgaaaaagagggttcttgaacctctgggcctggttgaggaacctgttaagacggctccgggaaaaaagaggccggtagagcactctcctgtggagccagactcctcctcgggaaccggaaaggcgggccagcagcctgcaagaaaaagattgaattttggtcagactggagacgcagactcagtacctgacccccagcctctcggacagccaccagcagccccctctggtctgggaactaatacgatggctacaggcagtggcgcaccaatggcagacaataacgagggcgccgacggagtgggtaattcctccggaaattggcattgcgattccacatggatgggcgacagagtcatcaccaccagcacccgaacctgggccctgcccacctacaacaaccacctctacaaacaaatttccagccaatcaggagcctcgaacgacaatcactactttggctacagcaccccttgggggtattttgacttcaacagattccactgccacttttcaccacgtgactggcaaagactcatcaacaacaactggggattccgacccaagagactcaacttcaagctctttaacattcaagtcaaagaggtcacgcagaatgacggtacgacgacgattgccaataaccttaccagcacggttcaggtgtttactgactcggagtaccagctcccgtacgtcctcggctcggcgcatcaaggatgcctcccgccgttcccagcagacgtcttcatggtgccacagtatggatacctcaccctgaacaacgggagtcaggcagtaggacgctcttcattttactgcctggagtactttccttctcagatgctgcgtaccggaaacaactttaccttcagctacacttttgaggacgttcctttccacagcagctacgctcacagccagagtctggaccgtctcatgaatcctctcatcgaccagtacctgtattacttgagcagaacaaacactccaagtggaaccaccacgcagtcaaggcttcagttttctcaggccggagcgagtgacattcgggaccagtctaggaactggcttcctggaccctgttaccgccagcagcgagtatcaaagacatctgcggataacaacaacagtgaatactcgtggactggagctaccaagtaccacctcaatggcagagactctctggtgaatccggccatggcaagccacaaggacgatgaagaaaagttttttcctcagagcggggttctcatctttgggaagcaaggctcagagaaaacaaatgtgaacattgaaaaggtcatgattacagacgaagaggaaatcggaacaaccaatcccgtggctacggagcagtatggttctgtatctaccaacctccagagaggcaacagacaagcagctaccgcagatgtcaacacacaaggcgttcttccaggcatggtctggcaggacagagatgtgtaccttcaggggcccatctgggcaaagattccacacacggacggacattttcacccctctcccctcatgggtggattcggacttaaacaccctcctccacagattctcatcaagaacaccccggtacctgcgaatccttcgaccaccttcagtgcggcaaagtttgcttccttcatcacacagtactccacgggacacggtcagcgtggagatcgagtgggagctgcagaaggaaaacagcaaacgctggaatcccgaaattcagtacacttccaactacaacaagtctgttaatcgtggacttaccgtggatactaatggcgtgtattcagagcctcgccccattggcaccagatacctgactcgtaatctgtaattgcttgttaatcaataaaccgtttaattcgtttcagttgaactttggtctctgcgtatttctttcttatctagtttccatggctacgtagataagtagcatggcgggttaatcattaactacaaggaacccctagtgatggagttggccactccctctctgcgcgctcgctcgctcactgaggccgggcgaccaaaggtcgcccgacgcccgggctttgcccgggcggcctcagtgagcgagcgagcgcgcagagagggagtggccaa

SEQ ID NO: 23 - DNA, 4679 bp, Adeno-associated virus 2
ttggccactccctctctgcgcgctcgctcgctcactgaggccgggcgaccaaaggtcgcccgacgcccgggctttgcccgggcggcctcagtgagcgagcgagcgcgcagagagggagtggccaactccatcactaggggttcctggaggggtggagtcgtgacgtgaattacgtcatagggttagggaggtcctgtattagaggtcacgtgagtgttttgcgacattttgcgacaccatgtggtcacgctgggtatttaagcccgagtgagcacgcagggtctccattttgaagcgggaggtttgaacgcgcagccgccatgccggggttttacgagattgtgattaaggtccccagcgaccttgacgggcatctgcccggcatttctgacagctttgtgaactgggtggccgagaaggaatgggagttgccgccagattctgacatggatctgaatctgattgagcaggcacccctgaccgtggccgagaagctgcagcgcgactttctgacggaatggcgccgtgtgagtaaggccccggaggcccttttctttgtgcaatttgagaagggagagagctacttccacatgcacgtgctcgtggaaaccaccggggtgaaatccatggttttgggacgtttcctgagtcagattcgcgaaaaactgattcagagaatttaccgcgggatcgagccgactttgccaaactggttcgcggtcacaaagaccagaaatggcgccggaggcgggaacaaggtggtggatgagtgctacatccccaattacttgctccccaaaacccagcctgagctccagtgggcgtggactaatatggaacagtatttaagcgcctgtttgaatctcacggagcgtaaacggttggtggcgcagcatctgacgcacgtgtcgcagacgcaggagcagaacaaagagaatcagaatcccaattctgatgcgccggtgatcagatcaaaaacttcagccaggtacatggagctggtcgggtggctcgtggacaaggggattacctcggagaagcagtggatccaggaggaccaggcctcatacatctccttcaatgcggcctccaactcgcggtcccaaatcaaggctgccttggacaatgcgggaaagattatgagcctgactaaaaccgcccccgactacctggtgggccagcagcccgtggaggacatttccagcaatcggatttataaaattttggaactaaacgggtacgatccccaatatgcggcttccgtctttctgggatgggccacgaaaaagttcggcaagaggaacaccatctggctgtttgggcctgcaactaccgggaagaccaacatcgcggaggccatagcccacactgtgcccttctacgggtgcgtaaactggaccaatgagaactttcccttcaacgactgtgtcgacaagatggtgatctggtgggaggaggggaagatgaccgccaaggtcgtggagtcggccaaagccattctcggaggaagcaaggtgcgcgtggaccagaaatgcaagtcctcggcccagatagacccgactcccgtgatcgtcacctccaacaccaacatgtgcgccgtgattgacgggaactcaacgaccttcgaacaccagcagccgttgcaagaccggatgttcaaatttgaactcacccgccgtctggatcatgactttgggaaggtcaccaagcaggaagtcaaagactttttccggtgggcaaaggatcacgtggttgaggtggagcatgaattctacgtcaaaaagggtggagccaagaaaagacccgcccccagtgacgcagatataagtgagcccaaacgggtgcgcgagtcagttgcgcagccatcgacgtcagacgcggaagcttcgatcaactacgcagacaggtaccaaaacaaatgttctcgtcacgtgggcatgaatctgatgctgtttccctgcagacaatgcgagagaatgaatcagaattcaaatatctgcttcactcacggacagaaagactgtttagagtgctttcccgtgtcagaatctcaacccgtttctgtcgtcaaaaaggcgtatcagaaactgtgctacattcatcatatcatgggaaaggtgccagacgcttgcactgcctgcgatctggtcaatgtggatttggatgactgcatctttgaacaataaatgatttaaatcaggtatggctgccgatggttatcttccagattggctcgaggacactctctctgaaggaataagacagtggtggaagctcaaacctggcccaccaccaccaaagcccgcagagcggcataaggacgacagcaggggtcttgtgcttcctgggtacaagtacctcggacccttcaacggactcgacaagggagagccggtcaacgaggcagacgccgcggccctcgagcacgacaaagcctacgaccggcagctcgacagcggagacaacccgtacctcaagtacaaccacgccgacgcggagtttcaggagcgccttaaagaagatacgtcttttgggggcaacctcggacgagcagtcttccaggcgaaaaagagggttcttgaacctctgggcctggttgaggaacctgttaagacggctccgggaaaaaagaggccggtagagcactctcctgtggagccagactcctcctcgggaaccggaaaggcgggccagcagcctgcaagaaaaagattgaattttggtcagactggagacgcagactcagtacctgacccccagcctctcggacagccaccagcagccccctctggtctgggaactaatacgatggctacaggcagtggcgcaccaatggcagacaataacgagggcgccgacggagtgggtaattcctccggaaattggcattgcgattccacatggatgggcgacagagtcatcaccaccagcacccgaacctgggccctgcccacctacaacaaccacctctacaaacaaatttccagccaatcaggagcctcgaacgacaatcactactttggctacagcaccccttgggggtattttgacttcaacagattccactgccacttttcaccacgtgactggcaaagactcatcaacaacaactggggattccgacccaagagactcaacttcaagctctttaacattcaagtcaaagaggtcacgcagaatgacggtacgacgacgattgccaataaccttaccagcacggttcaggtgtttactgactcggagtaccagctcccgtacgtcctcggctcggcgcatcaaggatgcctcccgccgttcccagcagacgtcttcatggtgccacagtatggatacctcaccctgaacaacgggagtcaggcagtaggacgctcttcattttactgcctggagtactttccttctcagatgctgcgtaccggaaacaactttaccttcagctacacttttgaggacgttcctttccacagcagctacgctcacagccagagtctggaccgtctcatgaatcctctcatcgaccagtacctgtattacttgagcagaacaaacactccaagtggaaccaccacgcagtcaaggcttcagttttctcaggccggagcgagtgacattcgggaccagtctaggaactggcttcctggaccctgttaccgccagcagcgagtatcaaagacatctgcggataacaacaacagtgaatactcgtggactggagctaccaagtaccacctcaatggcagagactctctggtgaatccgggcccggccatggcaagccacaaggacgatgaagaaaagttttttcctcagagcggggttctcatctttgggaagcaaggctcagagaaaacaaatgtggacattgaaaaggtcatgattacagacgaagaggaaatcaggacaaccaatcccgtggctacggagcagtatggttctgtatctaccaacctccagagaggcaacagacaagcagctaccgcagatgtcaacacacaaggcgttcttccaggcatggtctggcaggacagagatgtgtaccttcaggggcccatctgggcaaagattccacacacggacggacattttcacccctctcccctcatgggtggattcggacttaaacaccctcctccacagattctcatcaagaacaccccggtacctgcgaatccttcgaccaccttcagtgcggcaaagtttgcttccttcatcacacagtactccacgggacaggtcagcgtggagatcgagtgggagctgcagaaggaaaacagcaaacgctggaatcccgaaattcagtacacttccaactacaacaagtctgttaatgtggactttactgtggacactaatggcgtgtattcagagcctcgccccattggcaccagatacctgactcgtaatctgtaattgcttgttaatcaataaaccgtttaattcgtttcagttgaactttggtctctgcgtatttctttcttatctagtttccatggctacgtagataagtagcatggcgggttaatcattaactacaaggaacccctagtgatggagttggccactccctctctgcgcgctcgctcgctcactgaggccgggcgaccaaaggtcgcccgacgcccgggctttgcccgggcggcctcagtgagcgagcgagcgcgcagagagggagtggccaa

SEQ ID NO: 24 - protein, 725 aa, Adeno-associated virus-5
MAADGYLPDWLEDTLSEGIRQWWKLKPGPPPPKPAERHKDDSRGLVLPGYKYLGPFNGLDKGEPVNEADAAALEHDKAYDRQLDSGDNPYLKYNHADAEFQERLKEDTSFGGNLGRAVFQAKKRVLEPFGLVEEGAKTAPTGKRIDDHFPKRKKARTEEDSKPSTSSDAEAGPSGSQQLQIPAQPASSLGADTMSAGGGGPLGDNNQGADGVGNASGDWHCDSTWMGDRVVTKSTRTWVLPSYNNHQYREIKSGSVDGSNANAYFGYSTPWGYFDFNRFHSHWSPRDWQRLINNYWGFRPRSLRVKIFNIQVKEVTVQDSTTTIANNLTSTVQVFTDDDYQLPYVVGNGTEGCLPAFPPQVFTLPQYGYATLNRDNTENPTERSSFFCLEYFPSKMLRTGNNFEFTYNFEEVPFHSSFAPSQNLFKLANPLVDQYLYRFVSTNNTGGVQFNKNLAGRYANTYKNWFPGPMGRTQGWNLGSGVNRASVSAFATTNRMELEGASYQVPPQPNGMTNNLQGSNTYALENTMIFNSQPANPGTTATYLEGNMLITSESETQPVNRVAYNVGGQMATNNQSSTTAPTTGTYNLQEIVPGSVWMERDVYLQGPIWAKIPETGAHFHPSPAMGGFGLKHPPPMMLIKNTPVPGNITSFSDVPVSSFITQYSTGQVTVEMEWELKKENSKRWNPEIQYTNNYNDPQFVDFAPDSTGEYRTTRPIGTRYLTRPL

SEQ ID NO: 25 - protein, 644 aa, Artificial Sequence
  source: /note="Description of Artificial Sequence: Synthetic polypeptide"
  MOD_RES (434)..(434): Unknown
KAYDQQLKAGDNPYLRYNHADAEFQERLQEDTSFGGNLGRAVFQAKKRVLEPLGLVETPAKTAPGKKRPVDSPDSTSGIGKKGQQPAKKRLNFGQTGDSESVPDPQPIGEPPAGPSGLGSGTMAAGGGAPMADNNEGADGVGNASGNWHCDSTWLGDRVITTSTRTWALPTYNNHLYKQISSQSAGSTNDNVYFGYSTPWGYFDFNRFHCHFSPRDWQRLINNNWGFRPKKLNFKLFNIQVKEVTTNDGVTTIANNLTSTVQVFSDSEYQLPYVLGSAHQGCLPPFPADVFMIPQYGYLTLNNGSQSVGRSSFYCLEYFPSQMLRTGNNFTFSYTFEDVPFHSSYAHSQSLDRLMNPLIDQYLYYLARTQSNAGGTAGNRELQFYQGGPTTMAEQAKNWLPGPCFRQQRVSKTLDQNNNSNFAWTGATKYHLNXRNSLVNPGVAMATHKDDEERFFPSSGVLIFGKTGAANKTTLENVLMTNEEEIRPTNPVATEEYGIVSSNLQAASTAAQTQVVNNQGALPGMVWQNRDVYLQGPIWAKIPHTDGNFHPSPLMGGFGLKHPPPQILIKNTPVPANPPEVFTPAKFASFITQYSTGQVSVEIEWELQKENSKRWNPEIQYTSNFDKQTGVDFAVDSQGVYSEP

SEQ ID NO: 26 - DNA, 1933 bp, Artificial Sequence
  source: /note="Description of Artificial Sequence: Synthetic polynucleotide"
caaggcctacgaccagcagctcaaagcgggtgacaatccgtacctgcggtataaccacgccgacgccgagtttcaggagtgtcttcaagaagatacgtcttttgggggcaacctcgggcgagcagtcttccaggccaaaaagcgggttctcgaacctcttggtctggttgagacgccagctaagacggcacctggaaagaagcgaccggtagactcgccagactccacctcgggcatcggcaagaaaggccagcagcccgcgaaaaagagactcaactttgggcagactggcgactcagagtcagtccccgaccctcaaccaatcggagaaccaccagcaggcccctctggtctgggatctggtacaatggttgcaggcggtggcgcaccaatggctgacaataacgagggcgccgacggagtgggtaatgcctcaggaaattggcattgcgattccacatggctgggcgacagagtcatcaccaccagcacccgaacctgggccctgcccacctacaacaaccacctctacaagcaaatctccagtcagtcagcagggagcaccaacgataacgtctatttcggctacagcaccccctgggggtattttgacttcaacagattccattgccacttctcaccacgtgactggcagcgacttatcaacaacaactggggattccggcccaagaagctcaacttcaagctcttcaacatccaggtcaaggaggtcacgacgaatgacggtgtcacaaccatcgctaataaccttaccagcacggttcaggtcttttcggactcggaatatcaactgccgtacgtcctcggctccgcgcaccagggctgcctgcctccgttcccggcagacgtgttcatgattccgcagtacggatacctgactctgaacaatggcagccaatcggtaggccgttcctccttctactgcctggagtactttccttctcagatgctgagaacgggcaacaacttcacctttagctacaccttcgaggacgtgcctttccacagcagctacgcgcacagccagagtctggaccggctgatgaatcccctcatcgaccagtacctgtactacttggccagaacacagagcaacgcaggaggtactgctggcaatcgggaactgcagttttatcagggcggacctaccaccatggccgaacaagcaaagaactggctgcccggaccttgcttccggcaacagagagtatccaagacgctggatcaaaataacaacagcaactttgcctggactggtgccacaaaataccatttaaatggaagaaattcattggttaatcccggtgtcgccatggcaacccacaaggacgacgaggaacgcttctccccttcgagcggagttctaatttttggcaaaactggagcagctaataaaactacattagaaaacgtgctcatgacaaatgaagaagaaattcgtcctaccaacccggtagctaccgaggaatacgggattgtaagcagcaacttgcaggcggctagcaccgcagcccagacacaagttgttaacaaccagggagccttacctggcatggtctggcagaaccgggacgtgtacctgcaaggtcccatttgggccaagattcctcacacggacggcaactttcacccgtctcctctaatgggtggctttggactgaaacacccgcctccccagatcctgatcaaaaacacgccggtacctgctaatcctccagaagtgtttactcctgccaagtttgcttccttcatcacgcagtacagcaccgggcaagtcagcgttgagatcgagtgggagctgcagaaagagaacagcaagcgctggaacccagagattcagtacacctccaactttgacaaacagactggagtggactttgctgttgacagccagggtgtttactctgagcct

SEQ ID NO: 27 - protein, 644 aa, Artificial Sequence
  source: /note="Description of Artificial Sequence: Synthetic polypeptide"
KAYDQQLKAGDNPYLRYNHADAEFQECLQEDTSFGGNLGRAVFQAKKRVLEPLGLVETPAKTAPGKKRPVDSPDSTSGIGKKGQQPAKKRLNFGQTGDSESVPDPQPIGEPPAGPSGLGSGTMVAGGGAPMADNNEGADGVGNASGNWHCDSTWLGDRVITTSTRTWALPTYNNHLYKQISSQSAGSTNDNVYFGYSTPWGYFDFNRFHCHFSPRDWQRLINNNWGFRPKKLNFKLFNIQVKEVTTNDGVTTIANNLTSTVQVFSDSEYQLPYVLGSAHQGCLPPFPADVFMIPQYGYLTLNNGSQSVGRSSFYCLEYFPSQMLRTGNNFTFSYTFEDVPFHSSYAHSQSLDRLMNPLIDQYLYYLARTQSNAGGTAGNRELQFYQGGPTTMAEQAKNWLPGPCFRQQRVSKTLDQNNNSNFAWTGATKYHLNGRNSLVNPGVAMATHKDDEERFSPSSGVLIFGKTGAANKTTLENVLMTNEEEIRPTNPVATEEYGIVSSNLQAASTAAQTQVVNNQGALPGMVWQNRDVYLQGPIWAKIPHTDGNFHPSPLMGGFGLKHPPPQILIKNTPVPANPPEVFTPAKFASFITQYSTGQVSVEIEWELQKENSKRWNPEIQYTSNFDKQTGVDFAVDSQGVYSEP

SEQ ID NO: 28 - DNA, 1933 bp, Artificial Sequence
  source: /note="Description of Artificial Sequence: Synthetic polynucleotide"
caaggcctacgaccagcagctcaaagcgggtgacaatccgtacctgcggtataaccacgccgacgccgagtttcaggagcgtcttcaagaagatacgtcttttgggggcaacctcgggcgagcagtcttccaggccaaaaagcgggttctcgaacctcttggtctggttgagacgccagctaagacggcacctggaaagaagcgaccggtagactcgccagactccacctcgggcatcggcaagaaaggccagcagcccgcgaaaaagagactcaactttgggcagactggcgactcagagccagtccccgaccctcaaccaatcggagaaccaccagcaggcccctctggtctgggatctggtacaatggctgcaggcggtggcgcaccaatggctgacaataacgagggcgccgacggagtgggtaatgcctcaggaaattggcattgcgattccacacggctgggcgacagagtcatcaccaccagcacccgaacctgggccctgcccacctacaacaaccacctctacaagcaaatctccagtcagtcagcagggagcaccaacgataacgtctatttcggctacagcaccccctgggggtattttgacttcaacagattccattgccacttctcaccacgtgactggcagcgacttatcaacaacaactggggattccggcccaagaagctcaacttcaagctcttcaacatccaggtcaaggaggtcacgacgaatgacggcgtcacaaccatcgctaataaccttaccagcacggttcaggtcttttcggactcggaatatcaactgccgtacgtcctcggctccgcgcaccagggctgcctgcctccgttcccggcagacgtgttcatgattccgcagtacggatacctgactctgaacaatggcagccaatcggtaggccgttcctccttctactgcctggagtactttccttctcagatgctgagaacgggcaacaacttcacctttagctacaccttcgaggacgtgcctttccacagcagctacgcgcacagccagagtctgggccggctgatgaatcccctcatcgaccagtacctgtactacttggccagaacacagagcaacgcaggaggtactgctggcaatcgggaactgcagttttatcagggcggacctaccaccatggccgaacaagcaaagaactggctgcccggaccttgcttccggcaacagagagtatccaagacgctggatcaaaataacaacagcaactttgcctggactggtgccacaaaataccatttaaatggaagaaattcattggttaatcccggtgtcgccatggcaacccacaaggacgacgaggaacgcttcttcccttcgagcggagttctaatttttggcaaaactggagcagctaataaaactacattagaaaacgtgctcatgacaaatgaagaagaaattcgtcctaccaacccggtagctaccgaggaatacgggattgtaagcagcaacttgcaggcggctagcaccgcagcccagacacaagttgttaacaaccagggagccttacctggcatggtctggcagaaccgggacgtgtacctgcaaggtcccatttgggccaagattcctcacacggacggcaactttcacccgtctcctctaatgggtggctttggactgaaacacccgcctccccagatcctgatcaaaaacacaccggtacctgctaatcctccagaagtgtttactcctgccaagtttgcttccttcatcacgcagtacagcaccgggcaagtcagcgttgagatcgaatgggagctgcagaaagagaacagcaagcgctggaacccagagattcagtacacctccaactttgacaaacagactggagtggactttgctgttgacagccagggtgtttactctgagcct

SEQ ID NO: 29 - protein, 644 aa, Artificial Sequence
  source: /note="Description of Artificial Sequence: Synthetic polypeptide"
KAYDQQLKAGDNPYLRYNHADAEFQERLQEDTSFGGNLGRAVFQAKKRVLEPLGLVETPAKTAPGKKRPVDSPDSTSGIGKKGQQPAKKRLNFGQTGDSEPVPDPQPIGEPPAGPSGLGSGTMAAGGGAPMADNNEGADGVGNASGNWHCDSTRLGDRVITTSTRTWALPTYNNHLYKQISSQSAGSTNDNVYFGYSTPWGYFDFNRFHCHFSPRDWQRLINNNWGFRPKKLNFKLFNIQVKEVTTNDGVTTIANNLTSTVQVFSDSEYQLPYVLGSAHQGCLPPFPADVFMIPQYGYLTLNNGSQSVGRSSFYCLEYFPSQMLRTGNNFTFSYTFEDVPFHSSYAHSQSLGRLMNPLIDQYLYYLARTQSNAGGTAGNRELQFYQGGPTTMAEQAKNWLPGPCFRQQRVSKTLDQNNNSNFAWTGATKYHLNGRNSLVNPGVAMATHKDDEERFFPSSGVLIFGKTGAANKTTLENVLMTNEEEIRPTNPVATEEYGIVSSNLQAASTAAQTQVVNNQGALPGMVWQNRDVYLQGPIWAKIPHTDGNFHPSPLMGGFGLKHPPPQILIKNTPVPANPPEVFTPAKFASFITQYSTGQVSVEIEWELQKENSKRWNPEIQYTSNFDKQTGVDFAVDSQGVYSEP

SEQ ID NO: 30 - DNA, 1933 bp, Artificial Sequence; identical to SEQ ID NO: 28
  source: /note="Description of Artificial Sequence: Synthetic polynucleotide"

SEQ ID NO: 31 - protein, 644 aa, Artificial Sequence; identical to SEQ ID NO: 29
  source: /note="Description of Artificial Sequence: Synthetic polypeptide"

SEQ ID NO: 32 - DNA, 1933 bp, Artificial Sequence
  source: /note="Description of Artificial Sequence: Synthetic polynucleotide"
caaggcctacgaccagcagctcaaagcgggtgacaatccgtacctgcggtataaccacgccgacgccgagtttcaggagcgtcttcaagaagatacgtcttttgggggcaacctcgggcgagcagtcttccaggccaaaaagcgggttctcgaacctcttggtctggttgagacgccagctaagacggcacctggaaagaagcgaccggtagactcgccagactccacctcgggcatcggcaagaaaggccagcagcccgcgaaaaagagactcaactttgggcagactggcgactcagagtcagtccccgaccctcaaccaatcggagaaccaccagcaggcccctctggtctgggatctggtacaatggctgcaggcggtggcgcaccaatggctgacaatagcgagggcgccgacggagtgggtaatgcctcaggaaattggcattgcgattccacatggctgggcgacagagtcatcaccaccagcacccgaacctgggccctgcccacctacaacaaccacctctacaagcaaatctccagtcagtcagcagggagcaccaacgataacgtctatttcggctacagcaccccctgggggtattttgacttcaacagattccattgccacttctcaccacgtgactggcagcgacttatcaacaacaactggggattccggcccaagaagctcaacttcaagctcttcaacatccaggtcaaggaggtcacgacgaatgacggtgtcacaaccatcgctaataaccttaccagcacggttcaggtcttttcggactcggaatatcaactgccgtacgtcctcggctccgcgcaccagggctgcctgcctccgttcccggcagacgtgttcatgattccgcagtacggatacctgactctgaacaatggcagccaatcggtaggccgttcctccttctactgcctggagtactttccttctcagatgctgagaacgggcaacaacttcacctttagctacaccttcgaggacgtgcctttccacagcagctacgcgcacagccagagtctggaccggctgatgaatcccctcatcgaccagtacctgtactacttggccagaacacagagcaacgcaggaggtactgctggcaatcgggaactgcagttttatcagggcggacctaccaccatggccgaacaagcaaagaactggctgcccggaccttgcttccggcaacagagagtatccaagacgctggatcaaaataacaacagcaactttgcctggactggtgccacaaaataccatttaaatggaagaaattcattggttaatcccggtgtcgccatggcaacccacaaggacgacgaggaacgcttcttcccttcgagcggagttctaatttttggcaaaactggagcagctaataaaactacattagaaaacgtgctcatgacaaatgaagaagaaattcgtcctaccaacccggtagctaccgaggaatacgggattgtaagcagcaacttgcaggcggctagcaccgcagcccagacacaagttgttaacaaccagggagccttacctggcatggtctggcagaaccgggacgtgtacctgcaaggtcccatttgggccaagattcctcacacggacggcaactttcacccgtctcctctaatgggtggctttggactgaaacacccgcctccccagatcctgatcaaaaacacaccggtacctgctaatcctccagaagtgtttactcctgccaagcttgcttccttcatcacgcagtacagcaccgggcaagtcagcgttgagatcgagtgggagctgcagaaagagaacagcaagcgctggaacccagagattcagtacacctccaactttgacaaacagactggagtggactttgctgttgacagccagggtgtttactctgagcct

SEQ ID NO: 33 - protein, 644 aa, Artificial Sequence
  source: /note="Description of Artificial Sequence: Synthetic polypeptide"
KAYDQQLKAGDNPYLRYNHADAEFQERLQEDTSFGGNLGRAVFQAKKRVLEPLGLVETPAKTAPGKKRPVDSPDSTSGIGKKGQQPAKKRLNFGQTGDSESVPDPQPIGEPPAGPSGLGSGTMAAGGGAPMADNSEGADGVGNASGNWHCDSTWLGDRVITTSTRTWALPTYNNHLYKQISSQSAGSTNDNVYFGYSTPWGYFDFNRFHCHFSPRDWQRLINNNWGFRPKKLNFKLFNIQVKEVTTNDGVTTIANNLTSTVQVFSDSEYQLPYVLGSAHQGCLPPFPADVFMIPQYGYLTLNNGSQSVGRSSFYCLEYFPSQMLRTGNNFTFSYTFEDVPFHSSYAHSQSLDRLMNPLIDQYLYYLARTQSNAGGTAGNRELQFYQGGPTTMAEQAKNWLPGPCFRQQRVSKTLDQNNNSNFAWTGATKYHLNGRNSLVNPGVAMATHKDDEERFFPSSGVLIFGKTGAANKTTLENVLMTNEEEIRPTNPVATEEYGIVSSNLQAASTAAQTQVVNNQGALPGMVWQNRDVYLQGPIWAKIPHTDGNFHPSPLMGGFGLKHPPPQILIKNTPVPANPPEVFTPAKLASFITQYSTGQVSVEIEWELQKENSKRWNPEIQYTSNFDKQTGVDFAVDSQGVYSEP

SEQ ID NO: 34 - DNA, 1933 bp, Artificial Sequence
  source: /note="Description of Artificial Sequence: Synthetic polynucleotide"
caaggcctacgaccagcagctcaaagcgggtgacaatccgtacctgcggtataaccacgccgacgccgagtttcaggagcgtcttcaagaagatacgtcttttgggggcaacctcgggcgagcagtcttccaggccaaaaagcgggttctcgaacctcttggtctggttgagacgccagctaagacggcacctggaaagaagcgaccggtagactcgccagactccacctcgggcatcggcaagaaaggccagcagcccgcgaaaaagagactcaactttgggcagactggcgactcagagtcagtccccgaccctcaaccaatcggagaaccaccagcaggcccctctggtctgggatctggtacaatggctgcaggcggtggcgcaccaatggctgacaataacgagggcgccgacggagtgggtaatgcctcaggaaattggcattgcgattccacatggctgggcgacagagtcatcaccaccagcacccgaacctgggccctgcccacctacaacaaccacctctacaagcaaatctccagtcagtcagcagggagcaccaacgataacgtctatttcggctacagcaccccctgggggtattttgacttcaacagattccattgccacttctcaccacgtgactggcagcgacttatcaacaacaactggggattccggcccaagaagctcaacttcaagctcttcaacatccaggtcaaggaggtcacgacgaatgacggcgtcacaaccatcgctaataaccttaccagcacggttcaggtcttttcggacccggaatatcaactgccgtacgtcctcggctccgcgcaccagggctgcctgcctccgttcccggcagacgtgttcatgattccgcagtacggatacctgactctgaacaatggcagccaatcggtaggccgttcctccttctactgcctggagtactttccttctcagatgctgagaacgggcaacaacttcacctttagctacaccttcgaggacgtgcctttccacagcagctacgcgcacagccagagtctggaccggctgatgaatcccctcatcgaccagtacctgtactacttggccagaacacagagcaacgcaggaggtactgctggcaatcgggaactgcagttttatcagggcggacctaccaccatggccgaacaagcaaagaactggctgcccggaccttgcttccggcaacagagagtatccaagacgctggatcaaaataacaacagcaactttgcctggactggtgccacaaaataccatttaaatggaagaaattcattggttaatcccggtgtcgccatggcaacccacaaggacgacgaggaacgcttcttcccttcgagcggagttctaatttttggcaaaactggagcagctaataaaactacattagaaaacgtgctcatgacaaatgaagaagaaattcgtcctaccaacccggtagctaccgaggaatacgggattgtaagcagcaacttgcaggcggctagcaccgcagcccagacacaagttgttaacaaccagggagccttacctggcatggtctggcagaaccgggacgtgtacctgcaaggtcccatttgggccaagattcctcacacggacggcaactttcacccgtctcctctaatgggtggctttggactgaaacacccgcctccccagatcctgatcaaaaacacaccggtacctgctaatcctccagaagtgtttactcctgccaagattgcttccttcatcacgcagtacagcaccgggcaagtcagcgttgagatcgagtgggagctgcagaaagagaacagcaagcgctggaacccagagattcagtacacctccaactttgacaaacagactggagtggactttgctgttgacagccagggtgtttactctgagcct

SEQ ID NO: 35 - protein, 644 aa, Artificial Sequence
  source: /note="Description of Artificial Sequence: Synthetic polypeptide"
KAYDQQLKAGDNPYLRYNHADAEFQERLQEDTSFGGNLGRAVFQAKKRVLEPLGLVETPAKTAPGKKRPVDSPDSTSGIGKKGQQPAKKRLNFGQTGDSESVPDPQPIGEPPAGPSGLGSGTMAAGGGAPMADNNEGADGVGNASGNWHCDSTWLGDRVITTSTRTWALPTYNNHLYKQISSQSAGSTNDNVYFGYSTPWGYFDFNRFHCHFSPRDWQRLINNNWGFRPKKLNFKLFNIQVKEVTTNDGVTTIANNLTSTVQVFSDPEYQLPYVLGSAHQGCLPPFPADVFMIPQYGYLTLNNGSQSVGRSSFYCLEYFPSQMLRTGNNFTFSYTFEDVPFHSSYAHSQSLDRLMNPLIDQYLYYLARTQSNAGGTAGNRELQFYQGGPTTMAEQAKNWLPGPCFRQQRVSKTLDQNNNSNFAWTGATKYHLNGRNSLVNPGVAMATHKDDEERFFPSSGVLIFGKTGAANKTTLENVLMTNEEEIRPTNPVATEEYGIVSSNLQAASTAAQTQVVNNQGALPGMVWQNRDVYLQGPIWAKIPHTDGNFHPSPLMGGFGLKHPPPQILIKNTPVPANPPEVFTPAKIASFITQYSTGQVSVEIEWELQKENSKRWNPEIQYTSNFDKQTGVDFAVDSQGVYSEP

SEQ ID NO: 36 - protein, 738 aa, Artificial Sequence
  source: /note="Description of Artificial Sequence: Synthetic polypeptide"
MAADGYLPDWLEDNLSEGIREWWALKPGAPKPKANQQKQDDGRGLVLPGYKYLGPFNGLDKGEPVNAADAAALEHDKAYDQQLKAGDNPYLRYNHADAEFQERLQEDTSFGGNLGRAVFQAKKRVLEPLGLVEEGAKTAPGKKRPVEPSPQRSPDSTTGIGKKGQQPAKKRLNFGQTGDSESVPDPQPIGEPPAGPSGLGSGTMAAGGGAPMADNNEGADGVGSSSGNWHCDSTWLGDRVITTSTRTWALPTYNNHLYKQISNGTSGGSTNDNTYFGYSTPWGYFDFNRFHCHFSPRDWQRLINNNWGFRPKRLNFKLFNIQVKEVTQNEGTKTIANNLTSTIQVFTDSEYQLPYVLGSARQGCLPPFPADVFMIPQYGYLTLNNGSQAVGRSSFYCLEYFPSQMLRTGNNFEFSYQFEDVPFHSSYAHSQSLDRLMNPLIDQYLYYLSRTQSTGGTAGTQQLLFSQAGPNNMSAQAKNWLPGPCYRQQRVSTTLSQNNNSNFAWTGATKYHLNGRDSLVNPGVAMATHKDDEERFFPSSGVLMFGKQGAGKGNVDYSSVMLTSEEEIKTTNPVATEQYGVVADNLQQQNAAPIVGAVNSQGALPGMVWQNRDVYLQGPIWAKIPHTDGNFHPSPLMGGFGLKHPPPQILIKNTPVPADPPTTFSQAKLASFITQYSTGQVSVEIEWELQKENSKRWNPEIQYTSNYYKSTNVDFAVNTDGTYSEPRPIGTRYLTRNL

SEQ ID NO: 37 - DNA, 3121 bp, Artificial Sequence
  source: /note="Description of Artificial Sequence: Synthetic polynucleotide"
gaattcgcccttctacggctgcgtcaactggaccaatgagaactttcccttcaacgactgtgtcgacaagatggtgatctggtgggaggaggggaagatgaccgccaaggtcgtggagtcggccaaagccattctcggaggaagcaaggtgcgcgtggaccagaaatgcaagtcctcggcccagatagacccgactcccgtgatcgtcacctccaacaccaacatgtgcgccgtgattgacgggaactcaacgaccttcgaacaccagcagccgttgcaagaccggatgttcaaatttgaactcacccgccgtctggatcatgactttgggaaggtcaccaagcaggaagtcaaagactttttccggtgggcaaaggatcacgtggttgaggtggagcacgaattctacgtcaaaaagggtggagccaagaaaagacccgcccccagtgacgcagatataagtgagcccaaacgggtgcgcgagtcagttgcgcagccatcgacgtcagacgcggaagcttcgatcaactacgcagacaggtaccaaaacaaatgttctcgtcacgcgggcatgaatctgatgctgtttccctgcagacaatgcgagagaatgaatcagaattcaaatatctgcttcactcacggacagaaagactgtttagagtgctttcccgtgtcagaatctcaacccgtttctgtcgtcaaaaaggcgtatcagaaactgtgctacattcatcatatcatgggaaaggtgccagacgcttgcactgcctgcgatctggtcgatgtggatttggatgactgcatctttgaacaataaatgatttaaatcaggtatggctgccgatggttatcttccagattggctcgaggacaacctctctgagggcattcgcgagtggtgggcgctgaaacctggagccccgaagcccaaagccaaccagcaaaagcaggacggcggccggggtctggtgcttcctggctacaagtacctcggacccttcaacggactcgacaagggggagcccgtcaacgcggcggacgcagcggccctcgagcacgacaaggcctacgaccagcagctcaaagcgggtgacaatccgtacctgcggtataaccacgccgacgccgagtttcaggagcgtctgcaagaagatacgtcttttgggggcaacctcgggcgagcagtcttccaggccaagaagcgggttctcgaacctctcggtctggttgaggaaggcgctaagacggctcctggaaagaagagaccggtagagccatcaccccagcgttctccagactcctctacgggcatcggcaagaaaggccagcagcccgcgaaaaagagactcaactttgggcagactggcgactcagagtcagtgcccgaccctcaaccaatcggagaaccccccgcaggcccctctggtctgggatctggtacaatggctgcaggcggtggcgctccaatggcagacaataacgaaggcgccgacggagtgggtagttcctcaggaaattggcattgcgattccacatggctgggcgactgagtcatcaccaccagcacccgaacctgggccctccccacctacaacaaccacctctacaagcaaatctccaacgggacttcgggaggaagcaccaacgacaacacctacttcggctacagcaccccctgggggtattttgactttaacagattccactgccacttctcaccacgtgactggcagcgactcatcaacaacaactggggattccggcccaagagactcaacttcaagctcttcaacatccaggtcaaggaggtcacgcagaatgaaggcaccaagaccatcgccaataaccttaccagcacgattcaggtctttacggactcggaataccagctcccgtacgtcctcggctctgcgcaccagggctgcctgcctccgttcccggcggacgtcttcatgattcctcagtacgggtacctgactctgaacaatggcagtcaggccgtgggccgttcctccttctactgcctggagtactttccttctcaaatgctgagaacgggcaacaactttgagttcagctaccagtttgaggacgtgccttttcacagcagctacgcgcacagccaaagcctggaccggctgatgaaccccctcatcgaccagtacctgtactacctgtctcggactcagtccacgggaggtaccgcaggaactcagcagttgctattttctcaggccgggcctaataacatgtcggctcaggccaaaaactggctacccgggccctgctaccggcagtaacgcgtctccacgacactgtcgcaaaataacaacagcaactttgtctggaccggtgccaccaagtatcatctgaatggcagagactctctggtagatcccggtgtcgctatggcaacccacaaggacgacgaagagcgattttttccgtccagcggagtcataatgtttgggaaacagggagctggaaaagacaacgtggactatagcagcgtcatgctaaccagtgaggaagaaattaaaaccaccaacccagtggccacagaacagtacggcgtggtggccgataacctgcaacagcaaaacgccgctcctattgtaggggccgtcaacagtcaaggagccttacctggcatggtctggcagaaccgggacgtgtacctgcagggtcctacctgggccaagattcctcacacggacggaaactttcatccctcgccgctgatgggaggctttggactgaaacacccgcctcctcagatcctgattaagaatacacctgttcccgcggatcctccaactaccttcagtcaagctaagctggcgtcgttcatcacgcagtacagcaccggacaggtcagcgtggaaattgaatgggagctgcaggaagaaaacagcaaacgctggaacccagagattcaatacacttccaactactacaaatctacaaatgtggactttgctgttaacacagatggcacttattctgagcctcgccccatcggcacccgttacctcacccgtaatctgtaattgcttgttaatcaataaaccggttgattcgtttcagttgaactttggtctctgcgaagggcgaattc

SEQ ID NO: 38 - protein, 738 aa, Artificial Sequence
  source: /note="Description of Artificial Sequence: Synthetic polypeptide"
MAADGYLPDWLEDNLSEGIREWWALKPGAPKPKANQQKQDDGRGLVLPGYKYLGPFNGLDKGEPVNAADAAALEHDKAYDQQLKAGDNPYLRYNHADAEFQERLQEDTSFGGNLGRAVFQAKKRVLEPLGLVEEGAKTAPGKKRPVEPSPQRSPDSSTGIGKKGQQPAKKRLNFGQTGDSESVPDPQPIGEPPAGPSGLGSGTMAAGGGAPMADNNEGADGVGSSSGNWHCDSTWLGDGVITTSTRTWALPTYNNHLYKQISNGTSGGSTNDNTYFGYSTPWGYFDFNRFHCHFSPRDWQRLINNNWGFRPKSLNFKLFNIQVKEVTQNEGTKTIANNLTSTIQVFTDSEYQLPYVLGSAHQGCLPPFPADVFMIPQYGYLTLNNGSQAVGRSSFYCLEYFPSQMLRTGNNFEFSYQFEDVPFHSSYAHSQSLDRLMNPLIDQYLYYLSRTQSTGGTAGTQQLLFSQAGPNNMSAQAKNWLPGPCYRQQRVSTTLSQNDNSNFAWTGATKYHLNGRDSLVNPGVAMATHKDDEERFFPSSGVLMFGKQGAGKDNVDYSSVMLTSEEEIKTTNPVATEQYGVVADNLQQQNAAPIVGAVNSQGALPGMVWQNRDVYLQGPIWAKIPHTDGNFHPSPLMGGFGLKHPPPQILIKNTPVPADPPTTFSQAKLASFITQYSTGQVSVEIEWELQKENSKRWNPEIQYTSNYYKSTNVDFAVNTDGTYSEPRPIGTRYLTRNL

SEQ ID NO: 39 - DNA, 3121 bp, Artificial Sequence
  source: /note="Description of Artificial Sequence: Synthetic polynucleotide"
gaattcgcccttcgcgagaccaaagttcaactgaaacgaatcaaccggtttattgattaacaagcaattacagattacgggtgaggtaacgggtgccgatggggcgaggctcagaataagtgccatctgtgttaacagcaaagtccacatttgtagatttgtagtagttggaagtgtattgaatctctgggttccagcgtttgctgttttctttctgcagctcccattcaatttccacgctgacctgtccggtgctgtactgcgtgatgaacgacgccagcttagcttgactgaaggtagttggaggatccgcgggaacaggtgtattcttaatcaggatctgaggaggcgggtgtttcagtccaaagcctcccatcagcggcgagggatgaaagtttccgtccgtgtgaggaatcttggcccagataggaccctgcaggtacacgtcccggttctgccagaccatgccaggtaaggctccttgactgttgacggcccctacaataggagcggcgttttgctgttgcaggttatcggccaccacgccgtactgttctgtggccactgggttggtggttttaatttcttcctcactggttagcataacgctgctatagtccacgttgtcttttccagctccctgtttcccaaacattaagactccgctggacggaaaaaatcgctcttcgtcgtccttgtgggttgccatagcgacaccgggatttaccagagagtctctgccattcagatgatacttggtggcaccggtccaggcaaagttgctgttgtcattttgcgacagtgtcgtggagacgcgttgctgccggtagcagggcccgggtagccagtttttggcctgagccgacatgttattaggcccggcctgagaaaatagcaactgctgagttcctgcggtacctcccgtggactgagtccgagacaggtagtacaggtactggtcgatgagggggttcatcagccggtccaggctttggctgtgcgcgtagctgctgtgaaaaggcacgtcctcaaactggtagctgaactcaaagttgttgcccgttctcagcatttgagaaggaaagtactccaggcagtagaaggaggaacggcccacggcctgactgccattgttcagagtcaggtacccgtactgaggaatcatgaagacgtccgccgggaacggaggcaggcagccctggtgcgcagagccgaggacgtacgggagctggtattccgagtccgtaaagacctgaatcgtgctggtaaggttattggcgatggtcttggtgccttcattctgcgtgacctccttgacctggatgttgaagagcttgaagttgaggctcttgggccggaatccccagttgttgttgatgagtcgctgccagtcacgtggtgagaagtggcagtggaatctgttaaagtcaaaatacccccagggggtgctgtagccgaagtaggtgttgtcgttggtgcttcctcccgaagtcccgttggagatttgcttgtagaggtggttgttgtaggtggggagggcccaggttcgggtgctggtggtgatgactccgtcgcccagccatgtggaatcgcaatgccaatttcctgaggaactacccactccgtcggcgccttcgttattgtctgccattggagcgccaccgcctgcagccattgtaccagatcccagaccagaggggcctgcggggggttctccgattggttgagggtcgggcactgactctgagtcgccagtctgcccaaagttgagtctctttttcgcgggctgctggcctttcttgccgatgcccgtagaggagtctggagaacgctggggtgatggctctaccggtctcttctttccaggagccgtcttagcgccttcctcaaccagaccgagaggttcgagaacccgcttcttggcctggaagactgctcgcccgaggttgcccccaaaagacgtatcttcttgcagacgctcctgaaactcggcgtcggcgtggttataccgcaggtacggattgtcacccgctttgagctgctggtcgtaggccttgtcgtgctcgagggccgctgcgtccgccgcgttgacgggctcccccttgtcgagtccgttgaagggtccgaggtacttgtagccaggaagcaccagaccccggccgtcgtcctgcttttgctggttggctttgggcttcggggctccaggtttcagcgcccaccactcgcgaatgccctcagagaggttgtcctcgagccaatctggaagataaccatcggcagccatacctgatttaaatcatttattgttcaaagatgcagtcatccaaatccacattgaccagatcgcaggcagtgcaagcgtctggcacctttcccatgatatgatgaatgtagcacagtttctgatacgcctttttgacgacagaaacgggttgagattctgacacgggaaagcactctaaacagtctttctgtccgtgagtgaagcagatatttgaattctgattcattctctcgcattgtctgcagggaaacagcatcagattcatgcccacgtgacgagaacatttgttttggtacctgtctgcgtagttgatcgaagcttccgcgtctgacgtcgatggctgcgcaactgactcgcgcacccgtttgggctcacttatatctgcgtcactgggggcgggtcttttcttggctccaccctttttgacgtagaattcatgctccacctcaaccacgtgatcctttgcccaccggaaaaagtctttgacttcctgcttggtgaccttcccaaagtcatgatccagacggcgggtgagttcaaatttgaacatccggtcttgcaacggctgctggtgttcgaaggtcgttgagttcccgtcaatcacggcgcacatgttggtgttggaggtgacgatcacgggagtcgggtctatctgggccgaggacttgcatttctggtccacgcgcaccttgcttcctccgagaatggctttggccgactccacgaccttggcggtcatcttcccctcctcccaccagatcaccatcttgtcgacacagtcgttgaagggaaagttctcattggtccagttgacgcagccgtagaaagggcgaattc

SEQ ID NO: 40 - DNA, 2211 bp, Artificial Sequence
  source: /note="Description of Artificial Sequence: Synthetic polynucleotide"
atggctgctgacggttatcttccagattggctcgaggacaacctttctgaaggcattcgtgagtggtgggctctgaaacctggagtccctcaacccaaagcgaaccaacaacaccaggacaaccgtcggggtcttgtgcttccgggttacaaatacctcggacccggtaacggactcgacaaaggagagccggtcaacgaggcggacgcggcagccctcgaacacgacaaagcttacgaccagcagctcaaggccggtgacaacccgtacctcaagtacaaccacgccgacgccgagtttcaggagcgtcttcaagaagatacgtcttttgggggcaaccttggcagagcagtcttccaggccaaaaagaggatccttgagcctcttggtctggttgaggaagcagctaaaacggctcctggaaagaagggggctgtagatcagtctcctcaggaaccggactcatcatctggtgttggcaaatcgggcaaacagcctgccagaaaaagactaaatttcggtcagactggagactcagagtcagtcccagaccctcaacctctcggagaaccaccagcagcccccacaagtttgggatctaatacaatggcttcaggcggtggcgcaccaatggcagacaataacgagggtgccgatggagtgggtaattcctcaggaaattggcattgcgattcccaatggctgggcgacagagtcatcaccaccagcaccagaacctgggccctgcccacttacaacaaccatctctacaagcaaatctccagccaatcaggagcttcaaacgacaaccactactttggctacagcaccccttgggggtattttgactttaacagattccactgccacttctcaccacgtgactggcagcgactcattaacaacaactggggattccggcccaagaaactcagcttcaagctcttcaacatccaagttagaggggtcacgcagaacgatggcacgacgactattgccaataaccttaccagcacggttcaagtgtttacggactcggagtatcagctcccgtacgtgctcgggtcggcgcaccaaggctgtctcccgccgtttccagcggacgtcttcatggtccctcagtatggatacctcaccctgaacaacggaagtcaagcggtgggacgctcatccttttactgcctggagtacttcccttcgcagatgctaaggactggaaataacttccaattcagctataccttcgaggatgtaccttttcacagcagctacgctcacagccagagtttggatcgcttgatgaatcctcttattgatcagtatctgtactacctgaacagaacgcaaggaacaacctctggaacaaccaaccaatcacggctgctttttagccaggctgggcctcagtctatgtctttgcaggccagaaattggctacctgggccctgctaccggcaacagagactttcaaagactgctaacgacaacaacaacagtaactttccttggacagcggccagcaaatatcatctcaatggccgcgactcgctggtgaatccaggaccagctatggccagtcacaaggacgatgaagaaaaatttttccctatgcacggcaatctaatatttggcaaagaagggacaacggcaagtaacgcagaattagataatgtaatgattacggatgaagaagagattcgtaccaccaatcctgtggcaacagagcagtatggaactgtggcaaataacttgcagagctcaaatacagctcccacgactggaactgtcaatcatcagggggccttacctggcatggtgtggcaagatcgtgacgtgtaccttcaaggacctatctgggcaaagattcctcacacggatggacactttcatccttctcctctgatgggaggctttggactgaaacatccgcctcctcaaatcatgatcaaaaatactccggtaccggcaaatcctccgacgactttcagcccggccaagtttgcttcatttatcactcagtactccactggacaggtcagcgtggaaattgagtgggagctacagaaagaaaacagcaaacgttggaatccagagattcagtacacttccaactacaacaagtctgttaatgtggactttactgtagacactaatggtgtttatagtgaacctcgccctattggaacccggtatctcacacgaaacttgtga

SEQ ID NO: 41 - protein, 736 aa, Adeno-associated virus 3
MAADGYLPDWLEDNLSEGIREWWALKPGVPQPKANQQHQDNRRGLVLPGYKYLGPGNGLDKGEPVNEADAAALEHDKAYDQQLKAGDNPYLKYNHADAEFQERLQEDTSFGGNLGRAVFQAKKRILEPLGLVEEAAKTAPGKKGAVDQSPQEPDSSSGVGKSGKQPARKRLNFGQTGDSESVPDPQPLGEPPAAPTSLGSNTMASGGGAPMADNNEGADGVGNSSGNWHCDSQWLGDRVITTSTRTWALPTYNNHLYKQISSQSGASNDNHYFGYSTPWGYFDFNRFHCHFSPRDWQRLINNNWGFRPKKLSFKLFNIQVRGVTQNDGTTTIANNLTSTVQVFTDSEYQLPYVLGSAHQGCLPPFPADVFMVPQYGYLTLNNGSQAVGRSSFYCLEYFPSQMLRTGNNFQFSYTFEDVPFHSSYAHSQSLDRLMNPLIDQYLYYLNRTQGTTSGTTNQSRLLFSQAGPQSMSLQARNWLPGPCYRQQRLSKTANDNNNSNFPWTAASKYHLNGRDSLVNPGPAMASHKDDEEKFFPMHGNLIFGKEGTTASNAELDNVMITDEEEIRTTNPVATEQYGTVANNLQSSNTAPTTGTVNHQGALPGMVWQDRDVYLQGPIWAKIPHTDGHFHPSPLMGGFGLKHPPPQIMIKNTPVPANPPTTFSPAKFASFITQYSTGQVSVEIEWELQKENSKRWNPEIQYTSNYNKSVNVDFTVDTNGVYSEPRPIGTRYLTRNL

SEQ ID NO: 42 - DNA, 4726 bp, Adeno-associated virus serotype 3
ttggccactccctctatgcgcactcgctcgctcggtggggcctggcgaccaaaggtcgccagacggacgtgctttgcacgtccggccccaccgagcgagcgagtgcgcatagagggagtggccaactccatcactagaggtatggcagtgacgtaacgcgaagcgcgcgaagcgagaccacgcctaccagctgcgtcagcagtcaggtgacccttttgcgacagtttgcgacaccacgtggccgctgagggtatatattctcgagtgagcgaaccaggagctccattttgaccgcgaaatttgaacgagcagcagccatgccggggttctacgagattgtcctgaaggtcccgagtgacctggacgagcgcctgccgggcatttctaactcgtttgttaactgggtggccgagaaggaatgggacgtgccgccggattctgacatggatccgaatctgattgagcaggcacccctgaccgtggccgaaaagcttcagcgcgagttcctggtggagtggcgccgcgtgagtaaggccccggaggccctcttttttgtccagttcgaaaagggggagacctacttccacctgcacgtgctgattgagaccatcggggtcaaatccatggtggtcggccgctacgtgagccagattaaagagaagctggtgacccgcatctaccgcggggtcgagccgcagcttccgaactggttcgcggtgaccaaaacgcgaaatggcgccgggggcgggaacaaggtggtggacgactgctacatccccaactacctgctccccaagacccagcccgagctccagtgggcgtggactaacatggaccagtatttaagcgcctgtttgaatctcgcggagcgtaaacggctggtggcgcagcatctgacgcacgtgtcgcagacgcaggagcagaacaaagagaatcagaaccccaattctgacgcgccggtcatcaggtcaaaaacctcagccaggtacatggagctggtcgggtggctggtggaccgcgggatcacgtcagaaaagcaatggattcaggaggaccaggcctcgtacatctccttcaacgccgcctccaactcgcggtcccagatcaaggccgcgctggacaatgcctccaagatcatgagcctgacaaagacggctccggactacctggtgggcagcaacccgccggaggacattaccaaaaatcggatctaccaaatcctggagctgaacgggtacgatccgcagtacgcggcctccgtcttcctgggctgggcgcaaaagaagttcgggaagaggaacaccatctggctctttgggccggccacgacgggtaaaaccaacatcgcggaagccatcgcccacgccgtgcccttctacggctgcgtaaactggaccaatgagaactttcccttcaacgattgcgtcgacaagatggtgatctggtgggaggagggcaagatgacggccaaggtcgtggagagcgccaaggccattctgggcggaagcaaggtgcgcgtggaccaaaagtgcaagtcatcggcccagatcgaacccactcccgtgatcgtcacctccaacaccaacatgtgcgccgtgattgacgggaacagcaccaccttcgagcatcagcagccgctgcaggaccggatgtttgaatttgaacttacccgccgtttggaccatgactttgggaaggtcaccaaacaggaagtaaaggactttttccggtgggcttccgatcacgtgactgacgtggctcatgagttctacgtcagaaagggtggagctaagaaacgccccgcctccaatgacgcggatgtaagcgagccaaaacgggagtgcacgtcacttgcgcagccgacaacgtcagacgcggaagcaccggcggactacgcggacaggtaccaaaacaaatgttctcgtcacgtgggcatgaatctgatgctttttccctgtaaaacatgcgagagaatgaatcaaatttccaatgtctgttttacgcatggtcaaagagactgtggggaatgcttccctggaatgtcagaatctcaacccgtttctgtcgtcaaaaagaagacttatcagaaactgtgtccaattcatcatatcctgggaagggcacccgagattgcctgttcggcctgcgatttggccaatgtggacttggatgactgtgtttctgagcaataaatgacttaaaccaggtatggctgctgacggttatcttccagattggctcgaggacaacctttctgaaggcattcgtgagtggtgggctctgaaacctggagtccctcaacccaaagcgaaccaacaacaccaggacaaccgtcggggtcttgtgcttccgggttacaaatacctcggacccggtaacggactcgacaaaggagagccggtcaacgaggcggacgcggcagccctcgaacacgacaaagcttacgaccagcagctcaaggccggtgacaacccgtacctcaagtacaaccacgccgacgccgagtttcaggagcgtcttcaagaagatacgtcttttgggggcaaccttggcagagcagtcttccaggccaaaaagaggatccttgagcctcttggtctggttgaggaagcagctaaaacggctcctggaaagaagggggctgtagatcagtctcctcaggaaccggactcatcatctggtgttggcaaatcgggcaaacagcctgccagaaaaagactaaatttcggtcagactggagactcagagtcagtcccagaccctcaacctctcggagaaccaccagcagcccccacaagtttgggatctaatacaatggcttcaggcggtggcgcaccaatggcagacaataacgagggtgccgatggagtgggtaattcctcaggaaattggcattgcgattcccaatggctgggcgacagagtcatcaccaccagcaccagaacctgggccctgcccacttacaacaaccatctctacaagcaaatctccagccaatcaggagcttcaaacgacaaccactactttggctacagcaccccttgggggtattttgactttaacagattccactgccacttctcaccacgtgactggcagcgactcattaacaacaactggggattccggcccaagaaactcagcttcaagctcttcaacatccaagttagaggggtcacgcagaacgatggcacgacgactattgccaataaccttaccagcacggttcaagtgtttacggactcggagtatcagctcccgtacgtgctcgggtcggcgcaccaaggctgtctcccgccgtttccagcggacgtcttcatggtccctcagtatggatacctcaccctgaacaacggaagtcaagcggtgggacgctcatccttttactgcctggagtacttcccttcgcagatgctaaggactggaaataacttccaattcagctataccttcgaggatgtaccttttcacagcagctacgctcacagccagagtttggatcgcttgatgaatcctcttattgatcagtatctgtactacctgaacagaacgcaaggaacaacctctggaacaaccaaccaatcacggctgctttttagccaggctgggcctcagtctatgtctttgcaggccagaaattggctacctgggccctgctaccggcaacagagactttcaaagactgctaacgacaacaacaacagtaactttccttggacagcggccagcaaatatcatctcaatggccgcgactcgctggtgaatccaggaccagctatggccagtcacaaggacgatgaagaaaaatttttccctatgcacggcaatctaatatttggcaaagaagggacaacggcaagtaacgcagaattagataatgtaatgattacggatgaagaagagattcgtaccaccaatcctgtggcaacagagcagtatggaactgtggcaaataacttgcagagctcaaatacagctcccacgactggaactgtcaatcatcagggggccttacctggcatggtgtggcaagatcgtgacgtgtaccttcaaggacctatctgggcaaagattcctcacacggatggacactttcatccttctcctctgatgggaggctttggactgaaacatccgcctcctcaaatcatgatcaaaaatactccggtaccggcaaatcctccgacgactttcagcccggccaagtttgcttcatttatcactcagtactccactggacaggtcagcgtggaaattgagtgggagctacagaaagaaaacagcaaacgttggaatccagagattcagtacacttccaactacaacaagtctgttaatgtggactttactgtagacactaatggtgtttatagtgaacctcgccctattggaacccggtatctcacacgaaacttgtgaatcctggttaatcaataaaccgtttaattcgtttcagttgaactttggctcttgtgcacttctttatctttatcttgtttccatggctactgcgtagataagcagcggcctgcggcgcttgcgcttcgcggtttacaactgctggttaatatttaactctcgccatacctctagtgatggagttggccactccctctatgcgcactcgctcgctcggtggggcctggcgaccaaaggtcgccagacggacgtgctttgcacgtccggccccaccgagcgagcgagtgcgcatagagggagtggccaa

SEQ ID NO: 43 - protein, 737 aa, Artificial Sequence
  source: /note="Description of Artificial Sequence: Synthetic polypeptide"
MAADGYLPDWLEDNLSEGIREWWDLKPGAPKPKANQQKQDNGRGLVLPGYKYLGPFNGLDKGEPVNAADAAALEHDKAYDQQLNAGDNPYLRYNHADAEFQERLQEDTSFGGNLGRAVFQAKKRVLEPLGLVEEGAKTAPAKKRPVEPSPQRSPDSSTGIGKKGQQPARKRLNFGQTGDSESVPDPQPLGEPPAAPSSVGSGTVAAGGGAPMADNNEGADGVGNASGNWHCDSTWLGDRVITTSTRTWALPTYNNHLYEQISSETAGSTNDNTYFGYSTPWGYFDFNRFHCHFSPRDWQRLINNNWGFRPKKLRFKLFNIQVKEVTTNDGVTTIANNLTSTIQVFSDSEYQLPYVLGSAHQGCLPPFPADVFMIPQYGYLTLNNGSQSVGRSSFYCLEYFPSQMLRTGNNFEFSYSFEDVPFHSSYAHSQSLDRLMNPLIDQYLYYLARTQSDPGGTAGNRELQFYQGGPSTMAEQAKNWLPGPCFRQQRVSKTLDQNNNSNFAWTGATKYHLNGRNSLVNPGVAMATHKDDEDRFFPSSGVLIFGKTGATNKTTLENVLMTNEEEIRPTNPVATEEYGIVSSNLQAANTAAQTQVVNNQGALPGMVWQNRDVYLQGPIWAKIPHTDGNFHPSPLMGGFGLKHPPPQILIKNTPVPANPPEVFTPAKFASFITQYSTGQVSVEIEWELQKENSKRWDPEIQYTSNFEKQTGVDFAVDSQGVYSEPRPIGTRYLTRNL

SEQ ID NO: 44 - DNA, 2211 bp, Artificial Sequence
  source: /note="Description of Artificial Sequence: Synthetic polynucleotide"
atggctgctgacggttatcttccagattggctcgaggacaacctttctgaaggcattcgtgagtggtgggctctgaaacctggagtccctcaacccaaagcgaaccaacaacaccaggacaaccgtcggggtcttgtgcttccgggttacaaatacctcggacccggtaacggactcgacaaaggagagccggtcaacgaggcggacgcggcagccctcgaacacgacaaagcttacgaccagcagctcaaggccggtgacaacccgtacctcaagtacaaccacgccgacgccgagtttcaggagcgtcttcaagaagatacgtcttttgggggcaaccttggcagagcagtcttccaggccaaaaagaggatccttgagcctcttggtctggttgaggaagcagctaaaacggctcctggaaagaagggggctgtagatcagtctcctcaggaaccggactcatcatctggtgttggcaaatcgggcaaacagcctgccagaaaaagactaaatttcggtcagactggagactcagagtcagtcccagaccctcaacctctcggagaaccaccagcagcccccacaagtttgggatctaatacaatggcttcaggcggtggcgcaccaatggcagacaataacgagggtgccgatggagtgggtaattcctcaggaaattggcattgcgattcccaatggctgggcgacagagtcatcaccaccagcaccagaacctgggccctgcccacttacaacaaccatctctacaagcaaatctccagccaatcaggagcttcaaacgacaaccactactttggctacagcaccccttgggggtattttgactttaacagattccactgccacttctcaccacgtgactggcagcgactcattaacaacaactggggattccggcccaagaaactcagcttcaagctcttcaacatccaagttagaggggtcacgcagaacgatggcacgacgactattgccaataaccttaccagcacggttcaagtgtttacggactcggagtatcagctcccgtacgtgctcgggtcggcgcaccaaggctgtctcccgccgtttccagcggacgtcttcatggtccctcagtatggatacctcaccctgaacaacggaagtcaagcggtgggacgctcatccttttactgcctggagtacttcccttcgcagatgctaaggactggaaataacttccaattcagctataccttcgaggatgtaccttttcacagcagctacgctcacagccagagtttggatcgcttgatgaatcctcttattgatcagtatctgtactacctgaacagaacgcaaggaacaacctctggaacaaccaaccaatcacggctgctttttagccaggctgggcctcagtctatgtctttgcaggccagaaattggctacctgggccctgctaccggcaacagagactttcaaagactgctaacgacaacaacaacagtaactttccttggacagcggccagcaaatatcatctcaatggccgcgactcgctggtgaatccaggaccagctatggccagtcacaaggacgatgaagaaaaatttttccctatgcacggcaatctaatatttggcaaagaagggacaacggcaagtaacgcagaattagataatgtaatgattacggatgaagaagagattcgtaccaccaatcctgtggcaacagagcagtatggaactgtggcaaataacttgcagagctcaaatacagctcccacgactggaactgtcaatcatcagggggccttacctggcatggtgtggcaagatcgtgacgtgtaccttcaaggacctatctgggcaaagattcctcacacggatggacactttcatccttctcctctgatgggaggctttggactgaaacatccgcctcctcaaatcatgatcaaaaatactccggtaccggcaaatcctccgacgactttcagcccggccaagtttgcttcatttatcactcagtactccactggacaggtcagcgtggaaattgagtgggagctacagaaagaaaacagcaaacgttggaatccagagattcagtacacttccaactacaacaagtctgttaatgtggactttactgtagacactaatggtgtttatagtgaacctcgccctattggaacccggtatctcacacgaaacttgtaa

SEQ ID NO: 45 - protein, 736 aa, Artificial Sequence; identical to SEQ ID NO: 41
  source: /note="Description of Artificial Sequence: Synthetic polypeptide"

SEQ ID NO: 46 - protein, 736 aa, Adeno-associated virus 3A; identical to SEQ ID NO: 41

SEQ ID NO: 47 - protein, 624 aa, Adeno-associated virus 3A
MPGFYEIVLKVPSDLDERLPGISNSFVNWVAEKEWDVPPDSDMDPNLIEQAPLTVAEKLQREFLVEWRRVSKAPEALFFVQFEKGETYFHLHVLIETIGVKSMVVGRYVSQIKEKLVTRIYRGVEPQLPNWFAVTKTRNGAGGGNKVVDDCYIPNYLLPKTQPELQWAWTNMDQYLSACLNLAERKRLVAQHLTHVSQTQEQNKENQNPNSDAPVIRSKTSARYMELVGWLVDRGITSEKQWIQEDQASYISFNAASNSRSQIKAALDNASKIMSLTKTAPDYLVGSNPPEDITKNRIYQILELNGYDPQYAASVFLGWAQKKFGKRNTIWLFGPATTGKTNIAEAIAHAVPFYGCVNWTNENFPFNDCVDKMVIWWEEGKMTAKVVESAKAILGGSKVRVDQKCKSSAQIEPTPVIVTSNTNMCAVIDGNSTTFEHQQPLQDRMFEFELTRRLDHDFGKVTKQEVKDFFRWASDHVTDVAHEFYVRKGGAKKRPASNDADVSEPKRECTSLAQPTTSDAEAPADYADRYQNKCSRHVGMNLMLFPCKTCERMNQISNVCFTHGQRDCGECFPGMSESQPVSVVKKKTYQKLCPIHHILGRAPEIACSACDLANVDLDDCVSEQ

SEQ ID NO: 48 - protein, 736 aa, Adeno-associated virus 3B
MAADGYLPDWLEDNLSEGIREWWALKPGVPQPKANQQHQDNRRGLVLPGYKYLGPGNGLDKGEPVNEADAAALEHDKAYDQQLKAGDNPYLKYNHADAEFQERLQEDTSFGGNLGRAVFQAKKRILEPLGLVEEAAKTAPGKKRPVDQSPQEPDSSSGVGKSGKQPARKRLNFGQTGDSESVPDPQPLGEPPAAPTSLGSNTMASGGGAPMADNNEGADGVGNSSGNWHCDSQWLGDRVITTSTRTWALPTYNNHLYKQISSQSGASNDNHYFGYSTPWGYFDFNRFHCHFSPRDWQRLINNNWGFRPKKLSFKLFNIQVKEVTQNDGTTTIANNLTSTVQVFTDSEYQLPYVLGSAHQGCLPPFPADVFMVPQYGYLTLNNGSQAVGRSSFYCLEYFPSQMLRTGNNFQFSYTFEDVPFHSSYAHSQSLDRLMNPLIDQYLYYLNRTQGTTSGTTNQSRLLFSQAGPQSMSLQARNWLPGPCYRQQRLSKTANDNNNSNFPWTAASKYHLNGRDSLVNPGPAMASHKDDEEKFFPMHGNLIFGKEGTTASNAELDNVMITDEEEIRTTNPVATEQYGTVANNLQSSNTAPTTRTVNDQGALPGMVWQDRDVYLQGPIWAKIPHTDGHFHPSPLMGGFGLKHPPPQIMIKNTPVPANPPTTFSPAKFASFITQYSTGQVSVEIEWELQKENSKRWNPEIQYTSNYNKSVNVDFTVDTNGVYSEPRPIGTRYLTRNL

SEQ ID NO: 49 - protein, 624 aa, Adeno-associated virus 3B
MPGFYEIVLKVPSDLDEHLPGISNSFVNWVAEKEWELPPDSDMDPNLIEQAPLTVAEKLQREFLVEWRRVSKAPEALFFVQFEKGETYFHLHVLIETIGVKSMVVGRYVSQIKEKLVTRIYRGVEPQLPNWFAVTKTRNGAGGGNKVVDDCYIPNYLLPKTQPELQWAWTNMDQYLSACLNLAERKRLVAQHLTHVSQTQEQNKENQNPNSDAPVIRSKTSARYMELVGWLVDRGITSEKQWIQEDQASYISFNAASNSRSQIKAALDNASKIMSLTKTAPDYLVGSNPPEDITKNRIYQILELNGYDPQYAASVFLGWAQKKFGKRNTIWLFGPATTGKTNIAEAIAHAVPFYGCVNWTNENFPFNDCVDKMVIWWEEGKMTAKVVESAKAILGGSKVRVDQKCKSSAQIEPTPVIVTSNTNMCAVIDGNSTTFEHQQPLQDRMFKFELTRRLDHDFGKVTKQEVKDFFRWASDHVTDVAHEFYVRKGGAKKRPASNDADVSEPKRQCTSLAQPTTSDAEAPADYADRYQNKCSRHVGMNLMLFPCKTCERMNQISNVCFTHGQRDCGECFPGMSESQPVSVVKKKTYQKLCPIHHILGRAPEIACSACDLANVDLDDCVSEQ

SEQ ID NO: 50 - DNA, 4722 bp, Adeno-associated virus 3B
tggccactccctctatgcgcactcgctcgctcggtggggcctggcgaccaaaggtcgccagacggacgtgctttgcacgtccggccccaccgagcgagcgagtgcgcatagagggagtggccaactccatcactagaggtatggcagtgacgtaacgcgaagcgcgcgaagcgagaccacgcctaccagctgcgtcagcagtcaggtgacccttttgcgacagtttgcgacaccacgtggccgctgagggtatatattctcgagtgagcgaaccaggagctccattttgaccgcgaaatttgaacgagcagcagccatgccggggttctacgagattgtcctgaaggtcccgagtgacctggacgagcacctgccgggcatttctaactcgtttgttaactgggtggccgagaaggaatgggagctgccgccggattctgacatggatccgaatctgattgagcaggcacccctgaccgtggccgaaaagcttcagcgcgagttcctggtggagtggcgccgcgtgagtaaggccccggaggccctcttttttgtccagttcgaaaagggggagacctacttccacctgcacgtgctgattgagaccatcggggtcaaatccatggtggtcggccgctacgtgagccagattaaagagaagctggtgacccgcatctaccgcggggtcgagccgcagcttccgaactggttcgcggtgaccaaaacgcgaaatggcgccgggggcgggaacaaggtggtggacgactgctacatccccaactacctgctccccaagacccagcccgagctccagtgggcgtggactaacatggaccagtatttaagcgcctgtttgaatctcgcggagcgtaaacggctggtggcgcagcatctgacgcacgtgtcgcagacgcaggagcagaacaaagagaatcagaaccccaattctgacgcgccggtcatcaggtcaaaaacctcagccaggtacatggagctggtcgggtggctggtggaccgcgggatcacgtcagaaaagcaatggattcaggaggaccaggcctcgtacatctccttcaacgccgcctccaactcgcggtcccagatcaaggccgcgctggacaatgcctccaagatcatgagcctgacaaagacggctccggactacctggtgggcagcaacccgccggaggacattaccaaaaatcggatctaccaaatcctggagctgaacgggtacgatccgcagtacgcggcctccgtcttcctgggctgggcgcaaaagaagttcgggaagaggaacaccatctggctctttgggccggccacgacgggtaaaaccaacatcgcggaagccatcgcccacgccgtgcccttctacggctgcgtaaactggaccaatgagaactttcccttcaacgattgcgtcgacaagatggtgatctggtgggaggagggcaagatgacggccaaggtcgtggagagcgccaaggccattctgggcggaagcaaggtgcgcgtggaccaaaagtgcaagtcatcggcccagatcgaacccactcccgtgatcgtcacctccaacaccaacatgtgcgccgtgattgacgggaacagcaccaccttcgagcatcagcagccgctgcaggaccggatgtttaaatttgaacttacccgccgtttggaccatgactttgggaaggtcaccaaacaggaagtaaaggactttttccggtgggcttccgatcacgtgactgacgtggctcatgagttctacgtcagaaagggtggagctaagaaacgccccgcctccaatgacgcggatgtaagcgagccaaaacggcagtgcacgtcacttgcgcagccgacaacgtcagacgcggaagcaccggcggactacgcggacaggtaccaaaacaaatgttctcgtcacgtgggcatgaatctgatgctttttccctgtaaaacatgcgagagaatgaatcaaatttccaatgtctgttttacgcatggtcaaagagactgtggggaatgcttccctggaatgtcagaatctcaacccgtttctgtcgtcaaaaagaagacttatcagaaactgtgtccaattcatcatatcctgggaagggcacccgagattgcctgttcggcctgcgatttggccaatgtggacttggatgactgtgtttctgagcaataaatgacttaaaccaggtatggctgctgacggttatcttccagattggctcgaggacaacctttctgaaggcattcgtgagtggtgggctctgaaacctggagtccctcaacccaaagcgaaccaacaacaccaggacaaccgtcggggtcttgtgcttccgggttacaaatacctcggacccggtaacggactcgacaaaggagagccggtcaacgaggcggacgcggcagccctcgaacacgacaaagcttacgaccagcagctcaaggccggtgacaacccgtacctcaagtacaaccacgccgacgccgagtttcaggagcgtcttcaagaagatacgtcttttgggggcaaccttggcagagcagtcttccaggccaaaaagaggatccttgagcctcttggtctggttgaggaagcagctaaaacggctcctggaaagaagaggcctgtagatcagtctcctcaggaaccggactcatcatctggtgttggcaaatcgggcaaacagcctgccagaaaaagactaaatttcggtcagactggcgactcagagtcagtcccagaccctcaacctctcggagaaccaccagcagcccccacaagtttgggatctaatacaatggcttcaggcggtggcgcaccaatggcagacaataacgagggtgccgatggagtgggtaattcctcaggaaattggcattgcgattcccaatggctgggcgacagagtcatcaccaccagcaccagaacctgggccctgcccacttacaacaaccatctctacaagcaaatctccagccaatcaggagcttcaaacgacaaccactactttggctacagcaccccttgggggtattttgactttaacagattccactgccacttctcaccacgtgactggcagcgactcattaacaacaactggggattccggcccaagaaactcagcttcaagctcttcaacatccaagttaaagaggtcacgcagaacgatggcacgacgactattgccaataaccttaccagcacggttcaagtgtttacggactcggagtatcagctcccgtacgtgctcgggtcggcgcaccaaggctgtctcccgccgtttccagcggacgtcttcatggtccctcagtatggatacctcaccctgaacaacggaagtcaagcggtgggacgctcatccttttactgcctggagtacttcccttcgcagatgctaaggactggaaataacttccaattcagctataccttcgaggatgtaccttttcacagcagctacgctcacagccagagtttggatcgcttgatgaatcctcttattgatcagtatctgtactacctgaacagaacgcaaggaacaacctctggaacaaccaaccaatcacggctgctttttagccaggctgggcctcagtctatgtctttgcaggccagaaattggctacctgggccctgctaccggcaacagagactttcaaagactgctaacgacaacaacaacagtaactttccttggacagcggccagcaaatatcatctcaatggccgcgactcgctggtgaatccaggaccagctatggccagtcacaaggacgatgaagaaaaatttttccctatgcacggcaatctaatatttggcaaagaagggacaacggcaagtaacgcagaattagataatgtaatgattacggatgaagaagagattcgtaccaccaatcctgtggcaacagagcagtatggaactgtggcaaataacttgcagagctcaaatacagctcccacgactagaactgtcaatgatcagggggccttacctggcatggtgtggcaagatcgtgacgtgtaccttcaaggacctatctgggcaaagattcctcacacggatggacactttcatccttctcctctgatgggaggctttggactgaaacatccgcctcctcaaatcatgatcaaaaatactccggtaccggcaaatcctccgacgactttcagcccggccaagtttgcttcatttatcactcagtactccactggacaggtcagcgtggaaattgagtgggagctacagaaagaaaacagcaaacgttggaatccagagattcagtacacttccaactacaacaagtctgttaatgtggactttactgtagacactaatggtgtttatagtgaacctcgccctattggaacccggtatctcacacgaaacttgtaatcctggttaatcaataaaccgtttaattcgtttcagttgaactttggctcttgtgcacttcttatcttatcttgtttccatggctactgcgtagataagcagcggcctgcggcgcttgcgcttcgcggtttacaactgctggttaatatttaactctcgccatacctctagtgatggagttggccactccctctatgcgcactcgctcgctcggtggggccggacgtgcaaagcacgtccgtctggcgacctttggtcgccaggccccaccgagcgagcgagtgcgcatagagggagtggccaa

SEQ ID NO: 51 - DNA, 1800 bp, Adeno-associated virus 4
  modified_base (342)..(342): Unknown
acggctcctggaaagaagagaccgttgattgaatccccccagcagcccgactcctccacgggtatcggcaaaaaaggcaagcagccggctaaaaagaagctcgttttcgaagacgaaactggagcaggcgacggaccccctgagggatcaacttccggagccatgtctgatgacagtgagatgcgtgcagcagctggcggagctgcagtcgagggsggacaaggtgccgatggagtgggtaatgcctcgggtgattggcattgcgattccacctggtctgagggccacgtcacgaccaccagcaccagaacctgggtcttgcccacctacaacaaccacctntacaagcgactcggagagagcctgcagtccaacacctacaacggattctccaccccctggggatactttgacttcaaccgcttccactgccacttctcaccacgtgactggcagcgactcatcaacaacaactggggcatgcgacccaaagccatgcgggtcaaaatcttcaacatccaggtcaaggaggtcacgacgtcgaacggcgagacaacggtggctaataaccttaccagcacggttcagatctttgcggactcgtcgtacgaactgccgtacgtgatggatgcgggtcaagagggcagcctgcctccttttcccaacgacgtctttatggtgccccagtacggctactgtggactggtgaccggcaacacttcgcagcaacagactgacagaaatgccttctactgcctggagtactttccttcgcagatgctgcggactggcaacaactttgaaattacgtacagttttgagaaggtgcctttccactcgatgtacgcgcacagccagagcctggaccggctgatgaaccctctcatcgaccagtacctgtggggactgcaatcgaccaccaccggaaccaccctgaatgccgggactgccaccaccaactttaccaagctgcggcctaccaacttttccaactttaaaaagaactggctgcccgggccttcaatcaagcagcagggcttctcaaagactgccaatcaaaactacaagatccctgccaccgggtcagacagtctcatcaaatacgagacgcacagcactctggacggaagatggagtgccctgacccccggacctccaatggccacggctggacctgcggacagcaagttcagcaacagccagctcatctttgcggggcctaaacagaacggcaacacggccaccgtacccgggactctgatcttcacctctgaggaggagctggcagccaccaacgccaccgatacggacatgtggggcaacctacctggcggtgaccagagcaacagcaacctgccgaccgtggacagactgacagccttgggagccgtgcctggaatggtctggcaaaacagagacatttactaccagggtcccatttgggccaagattcctcataccgatggacactttcacccctcaccgctgattggtgggtttgggctgaaacacccgcctcctcaaatttttatcaagaacaccccggtacctgcgaatcctgcaacgaccttcagctctactccggtaaactccttcattactcagtacagcactggccaggtgtcggtgcagattgactgggagatccagaaggagcggtccaaacgctggaaccccgaggtccagtttacctccaactacggacagcaaaactctctgttgtgggctcccgatgcggctgggaaatacactgagcctagggctatcggtacccgctacctcacccaccacctgtaataa

SEQ ID NO: 52 - DNA, 2208 bp, Adeno-associated virus 4
  modified_base (750)..(750): Unknown
atgactgacggttaccttccagattggctagaggacaacctctctgaaggcgttcgagagtggtgggcgctgcaacctggagcccctaaacccaaggcaaatcaacaacatcaggacaacgctcggggtcttgtgcttccgggttacaaatacctcggacccggcaacggactcgacaagggggaacccgtcaacgcagcggacgcggcagccctcgagcacgacaaggcctacgaccagcagctcaaggccggtgacaacccctacctcaagtacaaccacgccgacgcggagttccagcagcggcttcagggcgacacatcgtttgggggcaacctcggcagagcagtcttccaggccaaaaagagggttcttgaacctcttggtctggttgagcaagcgggtgagacggctcctggaaagaagagaccgttgattgaatccccccagcagcccgactcctccacgggtatcggcaaaaaaggcaagcagccggctaaaaagaagctcgttttcgaagacgaaactggagcaggcgacggaccccctgagggatcaacttccggagccatgtctgatgacagtgagatgcgtgcagcagctggcggagctgcagtcgagggsggacaaggtgccgatggagtgggtaatgcctcgggtgattggcattgcgattccacctggtctgagggccacgtcacgaccaccagcaccagaacctgggtcttgcccacctacaacaaccacctntacaagcgactcggagagagcctgcagtccaacacctacaacggattctccaccccctggggatactttgacttcaaccgcttccactgccacttctcaccacgtgactggcagcgactcatcaacaacaactggggcatgcgacccaaagccatgcgggtcaaaatcttcaacatccaggtcaaggaggtcacgacgtcgaacggcgagacaacggtggctaataaccttaccagcacggttcagatctttgcggactcgtcgtacgaactgccgtacgtgatggatgcgggtcaagagggcagcctgcctccttttcccaacgacgtctttatggtgccccagtacggctactgtggactggtgaccggcaacacttcgcagcaacagactgacagaaatgccttctactgcctggagtactttccttcgcagatgctgcggactggcaacaactttgaaattacgtacagttttgagaaggtgcctttccactcgatgtacgcgcacagccagagcctggaccggctgatgaaccctctcatcgaccagtacctgtggggactgcaatcgaccaccaccggaaccaccctgaatgccgggactgccaccaccaactttaccaagctgcggcctaccaacttttccaactttaaaaagaactggctgcccgggccttcaatcaagcagcagggcttctcaaagactgccaatcaaaactacaagatccctgccaccgggtcagacagtctcatcaaatacgagacgcacagcactctggacggaagatggagtgccctgacccccggacctccaatggccacggctggacctgcggacagcaagttcagcaacagccagctcatctttgcggggcctaaacagaacggcaacacggccaccgtacccgggactctgatcttcacctctgaggaggagctggcagccaccaacgccaccgatacggacatgtggggcaacctacctggcggtgaccagagcaacagcaacctgccgaccgtggacagactgacagccttgggagccgtgcctggaatggtctggcaaaacagagacatttactaccagggtcccatttgggccaagattcctcataccgatggacactttcacccctcaccgctgattggtgggtttgggctgaaacacccgcctcctcaaatttttatcaagaacaccccggtacctgcgaatcctgcaacgaccttcagctctactccggtaaactccttcattactcagtacagcactggccaggtgtcggtgcagattgactgggagatccagaaggagcggtccaaacgctggaaccccgaggtccagtttacctccaactacggacagcaaaactctctgttgtgggctcccgatgcggctgggaaatacactgagcctagggctatcggtacccgctacctcacccaccacctgtaataa

SEQ ID NO: 53 - DNA, 1872 bp, Adeno-associated virus 4
atgccggggttctacgagatcgtgctgaaggtgcccagcgacctggacgagcacctgcccggcatttctgactcttttgtgagctgggtggccgagaaggaatgggagctgccgccggattctgacatggacttgaatctgattgagcaggcacccctgaccgtggccgaaaagctgcaacgcgagttcctggtcgagtggcgccgcgtgagtaaggccccggaggccctcttctttgtccagttcgagaagggggacagctacttccacctgcacatcctggtggagaccgtgggcgtcaaatccatggtggtgggccgctacgtgagccagattaaagagaagctggtgacccgcatctaccgcggggtcgagccgcagcttccgaactggttcgcggtgaccaagacgcgtaatggcgccggaggcgggaacaaggtggtggacgactgctacatccccaactacctgctccccaagacccagcccgagctccagtgggcgtggactaacatggaccagtatataagcgcctgtttgaatctcgcggagcgtaaacggctggtggcgcagcatctgacgcacgtgtcgcagacgcaggagcagaacaaggaaaaccagaaccccaattctgacgcgccggtcatcaggtcaaaaacctccgccaggtacatggagctggtcgggtggctggtggaccgcgggatcacgtcagaaaagcaatggatccaggaggaccaggcgtcctacatctccttcaacgccgcctccaactcgcggtcacaaatcaaggccgcgctggacaatgcctccaaaatcatgagcctgacaaagacggctccggactacctggtgggccagaacccgccggaggacatttccagcaaccgcatctaccgaatcctcgagatgaacgggtacgatccgcagtacgcggcctccgtcttcctgggctgggcgcaaaagaagttcgggaagaggaacaccatctggctctttgggccggccacgacgggtaaaaccaacatcgcggaagccatcgcccacgccgtgcccttctacggctgcgtgaactggaccaatgagaactttccgttcaacgattgcgtcgacaagatggtgatctggtgggaggagggcaagatgacggccaaggtcgtagagagcgccaaggccatcctgggcggaagcaaggtgcgcgtggaccaaaagtgcaagtcatcggcccagatcgacccaactcccgtgatcgtcacctccaacaccaacatgtgcgcggtcatcgacggaaactcgaccaccttcgagcaccaacaaccactccaggaccggatgttcaagttcgagctcaccaagcgcctggagcacgactttggcaaggtcaccaagcaggaagtcaaagactttttccggtgggcgtcagatcacgtgaccgaggtgactcacgagttttacgtcagaaagggtggagctagaaagaggcccgcccccaatgacgcagatataagtgagcccaagcgggcctgtccgtcagttgcgcagccatcgacgtcagacgcggaagctccggtggactacgcggacaggtaccaaaacaaatgttctcgtcacgtgggtatgaatctgatgctttttccctgccggcaatgcgagagaatgaatcagaatgtggacatttgcttcacgcacggggtcatggactgtgccgagtgcttccccgtgtcagaatctcaacccgtgtctgtcgtcagaaagcggacgtatcagaaactgtgtccgattcatcacatcatggggagggcgcccgaggtggcctgctcggcctgcgaactggccaatgtggacttggatgactgtgacatggaacaataa

SEQ ID NO: 54 - DNA, 1611 bp, Adeno-associated virus 4
atgccggggttctacgagatcgtgctgaaggtgcccagcgacctggacgagcacctgcccggcatttctgactcttttgtgagctgggtggccgagaaggaatgggagctgccgccggattctgacatggacttgaatctgattgagcaggcacccctgaccgtggccgaaaagctgcaacgcgagttcctggtcgagtggcgccgcgtgagtaaggccccggaggccctcttctttgtccagttcgagaagggggacagctacttccacctgcacatcctggtggagaccgtgggcgtcaaatccatggtggtgggccgctacgtgagccagattaaagagaagctggtgacccgcatctaccgcggggtcgagccgcagcttccgaactggttcgcggtgaccaagacgcgtaatggcgccggaggcgggaacaaggtggtggacgactgctacatccccaactacctgctccccaagacccagcccgagctccagtgggcgtggactaacatggaccagtatataagcgcctgtttgaatctcgcggagcgtaaacggctggtggcgcagcatctgacgcacgtgtcgcagacgcaggagcagaacaaggaaaaccagaaccccaattctgacgcgccggtcatcaggtcaaaaacctccgccaggtacatggagctggtcgggtggctggtggaccgcgggatcacgtcagaaaagcaatggatccaggaggaccaggcgtcctacatctccttcaacgccgcctccaactcgcggtcacaaatcaaggccgcgctggacaatgcctccaaaatcatgagcctgacaaagacggctccggactacctggtgggccagaacccgccggaggacatttccagcaaccgcatctaccgaatcctcgagatgaacgggtacgatccgcagtacgcggcctccgtcttcctgggctgggcgcaaaagaagttcgggaagaggaacaccatctggctctttgggccggccacgacgggtaaaaccaacatcgcggaagccatcgcccacgccgtgcccttctacggctgcgtgaactggaccaatgagaactttccgttcaacgattgcgtcgacaagatggtgatctggtgggaggagggcaagatgacggccaaggtcgtagagagcgccaaggccatcctgggcggaagcaaggtgcgcgtggaccaaaagtgcaagtcatcggcccagatcgacccaactcccgtgatcgtcacctccaacaccaacatgtgcgcggtcatcgacggaaactcgaccaccttcgagcaccaacaaccactccaggaccggatgttcaagttcgagctcaccaagcgcctggagcacgactttggcaaggtcaccaagcaggaagtcaaagactttttccggtgggcgtcagatcacgtgaccgaggtgactcacgagttttacgtcagaaagggtggagctagaaagaggcccgcccccaatgacgcagatataagtgagcccaagcgggcctgtccgtcagttgcgcagccatcgacgtcagacgcggaagctccggtggactacgcggacagattggctagaggacaacctctctga

SEQ ID NO: 55 - DNA, 1872 bp, Adeno-associated virus 4; identical to SEQ ID NO: 53

SEQ ID NO: 56 - DNA, 1617 bp, Adeno-associated virus 4
  modified_base (162)..(162): Unknown
atgcgtgcagcagctggcggagctgcagtcgagggsggacaaggtgccgatggagtgggtaatgcctcgggtgattggcattgcgattccacctggtctgagggccacgtcacgaccaccagcaccagaacctgggtcttgcccacctacaacaaccacctntacaagcgactcggagagagcctgcagtccaacacctacaacggattctccaccccctggggatactttgacttcaaccgcttccactgccacttctcaccacgtgactggcagcgactcatcaacaacaactggggcatgcgacccaaagccatgcgggtcaaaatcttcaacatccaggtcaaggaggtcacgacgtcgaacggcgagacaacggtggctaataaccttaccagcacggttcagatctttgcggactcgtcgtacgaactgccgtacgtgatggatgcgggtcaagagggcagcctgcctccttttcccaacgacgtctttatggtgccccagtacggctactgtggactggtgaccggcaacacttcgcagcaacagactgacagaaatgccttctactgcctggagtactttccttcgcagatgctgcggactggcaacaactttgaaattacgtacagttttgagaaggtgcctttccactcgatgtacgcgcacagccagagcctggaccggctgatgaaccctctcatcgaccagtacctgtggggactgcaatcgaccaccaccggaaccaccctgaatgccgggactgccaccaccaactttaccaagctgcggcctaccaacttttccaactttaaaaagaactggctgcccgggccttcaatcaagcagcagggcttctcaaagactgccaatcaaaactacaagatccctgccaccgggtcagacagtctcatcaaatacgagacgcacagcactctggacggaagatggagtgccctgacccccggacctccaatggccacggctggacctgcggacagcaagttcagcaacagccagctcatctttgcggggcctaaacagaacggcaacacggccaccgtacccgggactctgatcttcacctctgaggaggagctggcagccaccaacgccaccgatacggacatgtggggcaacctacctggcggtgaccagagcaacagcaacctgccgaccgtggacagactgacagccttgggagccgtgcctggaatggtctggcaaaacagagacatttactaccagggtcccatttgggccaagattcctcataccgatggacactttcacccctcaccgctgattggtgggtttgggctgaaacacccgcctcctcaaatttttatcaagaacaccccggtacctgcgaatcctgcaacgaccttcagctctactccggtaaactccttcattactcagtacagcactggccaggtgtcggtgcagattgactgggagatccagaaggagcggtccaaacgctggaaccccgaggtccagtttacctccaactacggacagcaaaactctctgttgtgggctcccgatgcggctgggaaatacactgagcctagggctatcggtacccgctacctcacccaccacctgtaa

SEQ ID NO: 57 - DNA, 939 bp, Adeno-associated virus 4
atggagctggtcgggtggctggtggaccgcgggatcacgtcagaaaagcaatggatccaggaggaccaggcgtcctacatctccttcaacgccgcctccaactcgcggtcacaaatcaaggccgcgctggacaatgcctccaaaatcatgagcctgacaaagacggctccggactacctggtgggccagaacccgccggaggacatttccagcaaccgcatctaccgaatcctcgagatgaacgggtacgatccgcagtacgcggcctccgtcttcctgggctgggcgcaaaagaagttcgggaagaggaacaccatctggctctttgggccggccacgacgggtaaaaccaacatcgcggaagccatcgcccacgccgtgcccttctacggctgcgtgaactggaccaatgagaactttccgttcaacgattgcgtcgacaagatggtgatctggtgggaggagggcaagatgacggccaaggtcgtagagagcgccaaggccatcctgggcggaagcaaggtgcgcgtggaccaaaagtgcaagtcatcggcccagatcgacccaactcccgtgatcgtcacctccaacaccaacatgtgcgcggtcatcgacggaaactcgaccaccttcgagcaccaacaaccactccaggaccggatgttcaagttcgagctcaccaagcgcctggagcacgactttggcaaggtcaccaagcaggaagtcaaagactttttccggtgggcgtcagatcacgtgaccgaggtgactcacgagttttacgtcagaaagggtggagctagaaagaggcccgcccccaatgacgcagatataagtgagcccaagcgggcctgtccgtcagttgcgcagccatcgacgtcagacgcggaagctccggtggactacgcggacagattggctagaggacaacctctctga

SEQ ID NO: 58 - DNA, 1197 bp, Adeno-associated virus 4
atggagctggtcgggtggctggtggaccgcgggatcacgtcagaaaagcaatggatccaggaggaccaggcgtcctacatctccttcaacgccgcctccaactcgcggtcacaaatcaaggccgcgctggacaatgcctccaaaatcatgagcctgacaaagacggctccggactacctggtgggccagaacccgccggaggacatttccagcaaccgcatctaccgaatcctcgagatgaacgggtacgatccgcagtacgcggcctccgtcttcctgggctgggcgcaaaagaagttcgggaagaggaacaccatctggctctttgggccggccacgacgggtaaaaccaacatcgcggaagccatcgcccacgccgtgcccttctacggctgcgtgaactggaccaatgagaactttccgttcaacgattgcgtcgacaagatggtgatctggtgggaggagggcaagatgacggccaaggtcgtagagagcgccaaggccatcctgggcggaagcaaggtgcgcgtggaccaaaagtgcaagtcatcggcccagatcgacccaactcccgtgatcgtcacctccaacaccaacatgtgcgcggtcatcgacggaaactcgaccaccttcgagcaccaacaaccactccaggaccggatgttcaagttcgagctcaccaagcgcctggagcacgactttggcaaggtcaccaagcaggaagtcaaagactttttccggtgggcgtcagatcacgtgaccgaggtgactcacgagttttacgtcagaaagggtggagctagaaagaggcccgcccccaatgacgcagatataagtgagcccaagcgggcctgtccgtcagttgcgcagccatcgacgtcagacgcggaagctccggtggactacgcggacaggtaccaaaacaaatgttctcgtcacgtgggtatgaatctgatgctttttccctgccggcaatgcgagagaatgaatcagaatgtggacatttgcttcacgcacggggtcatggactgtgccgagtgcttccccgtgtcagaatctcaacccgtgtctgtcgtcagaaagcggacgtatcagaaactgtgtccgattcatcacatcatggggagggcgcccgaggtggcctgctcggcctgcgaactggccaatgtggacttggatgactgtgacatggaacaa

SEQ ID NO: 59 - DNA, 245 bp, Adeno-associated virus 4
ctccatcatctaggtttgcccactgacgtcaatgtgacgtcctagggttagggaggtccctgtattagcagtcacgtgagtgtcgtatttcgcggagcgtagcggagcgcataccaagctgccacgtcacagccacgtggtccgtttgcgacagtttgcgacaccatgtggtcaggagggtatataaccgcgagtgagccagcgaggagctccattttgcccgcgaattttgaacgagcagcagc

SEQ ID NO: 60 - protein, 313 aa, Adeno-associated virus 4
  MOD_RES (313)..(313): Unknown
MELVGWLVDRGITSEKQWIQEDQASYISFNAASNSRSQIKAALDNASKIMSLTKTAPDYLVGQNPPEDISSNRIYRILEMNGYDPQYAASVFLGWAQKKFGKRNTIWLFGPATTGKTNIAEAIAHAVPFYGCVNWTNENFPFNDCVDKMVIWWEEGKMTAKVVESAKAILGGSKVRVDQKCKSSAQIDPTPVIVTSNTNMCAVIDGNSTTFEHQQPLQDRMFKFELTKRLEHDFGKVTKQEVKDFFRWASDHVTEVTHEFYVRKGGARKRPAPNDADISEPKRACPSVAQPSTSDAEAPVDYADRLARGQPLX

SEQ ID NO: 61 - protein, 399 aa, Adeno-associated virus 4
MELVGWLVDRGITSEKQWIQEDQASYISFNAASNSRSQIKAALDNASKIMSLTKTAPDYLVGQNPPEDISSNRIYRILEMNGYDPQYAASVFLGWAQKKFGKRNTIWLFGPATTGKTNIAEAIAHAVPFYGCVNWTNENFPFNDCVDKMVIWWEEGKMTAKVVESAKAILGGSKVRVDQKCKSSAQIDPTPVIVTSNTNMCAVIDGNSTTFEHQQPLQDRMFKFELTKRLEHDFGKVTKQEVKDFFRWASDHVTEVTHEFYVRKGGARKRPAPNDADISEPKRACPSVAQPSTSDAEAPVDYADRYQNKCSRHVGMNLMLFPCRQCERMNQNVDICFTHGVMDCAECFPVSESQPVSVVRKRTYQKLCPIHHIMGRAPEVACSACELANVDLDDCDMEQ

SEQ ID NO: 62 - protein, 623 aa, Adeno-associated virus 4
MPGFYEIVLKVPSDLDEHLPGISDSFVSWVAEKEWELPPDSDMDLNLIEQAPLTVAEKLQREFLVEWRRVSKAPEALFFVQFEKGDSYFHLHILVETVGVKSMVVGRYVSQIKEKLVTRIYRGVEPQLPNWFAVTKTRNGAGGGNKVVDDCYIPNYLLPKTQPELQWAWTNMDQYISACLNLAERKRLVAQHLTHVSQTQEQNKENQNPNSDAPVIRSKTSARYMELVGWLVDRGITSEKQWIQEDQASYISFNAASNSRSQIKAALDNASKIMSLTKTAPDYLVGQNPPEDISSNRIYRILEMNGYDPQYAASVFLGWAQKKFGKRNTIWLFGPATTGKTNIAEAIAHAVPFYGCVNWTNENFPFNDCVDKMVIWWEEGKMTAKVVESAKAILGGSKVRVDQKCKSSAQIDPTPVIVTSNTNMCAVIDGNSTTFEHQQPLQDRMFKFELTKRLEHDFGKVTKQEVKDFFRWASDHVTEVTHEFYVRKGGARKRPAPNDADISEPKRACPSVAQPSTSDAEAPVDYADRYQNKCSRHVGMNLMLFPCRQCERMNQNVDICFTHGVMDCAECFPVSESQPVSVVRKRTYQKLCPIHHIMGRAPEVACSACELANVDLDDCDMEQ

SEQ ID NO: 63 - protein, 537 aa, Adeno-associated virus 4
  MOD_RES (537)..(537): Unknown
MPGFYEIVLKVPSDLDEHLPGISDSFVSWVAEKEWELPPDSDMDLNLIEQAPLTVAEKLQREFLVEWRRVSKAPEALFFVQFEKGDSYFHLHILVETVGVKSMVVGRYVSQIKEKLVTRIYRGVEPQLPNWFAVTKTRNGAGGGNKVVDDCYIPNYLLPKTQPELQWAWTNMDQYISACLNLAERKRLVAQHLTHVSQTQEQNKENQNPNSDAPVIRSKTSARYMELVGWLVDRGITSEKQWIQEDQASYISFNAASNSRSQIKAALDNASKIMSLTKTAPDYLVGQNPPEDISSNRIYRILEMNGYDPQYAASVFLGWAQKKFGKRNTIWLFGPATTGKTNIAEAIAHAVPFYGCVNWTNENFPFNDCVDKMVIWWEEGKMTAKVVESAKAILGGSKVRVDQKCKSSAQIDPTPVIVTSNTNMCAVIDGNSTTFEHQQPLQDRMFKFELTKRLEHDFGKVTKQEVKDFFRWASDHVTEVTHEFYVRKGGARKRPAPNDADISEPKRACPSVAQPSTSDAEAPVDYADRLARGQPLX

SEQ ID NO: 64 - protein, 623 aa, Adeno-associated virus 4; identical to SEQ ID NO: 62

SEQ ID NO: 65 - protein, 544 aa, Adeno-associated virus 4
MSDDSEMRAAAGGAAVEGGQGADGVGNASGDWHCDSTWSEGHVTTTSTRTWVLPTYNNHLYKRLGESLQSNTYNGFSTPWGYFDFNRFHCHFSPRDWQRLINNNWGMRPKAMRVKIFNIQVKEVTTSNGETTVANNLTSTVQIFADSSYELPYVMDAGQEGSLPPFPNDVFMVPQYGYCGLVTGNTSQQQTDRNAFYCLEYFPSQMLRTGNNFEITYSFEKVPFHSMYAHSQSLDRLMNPLIDQYLWGLQSTTTGTTLNAGTATTNFTKLRPTNFSNFKKNWLPGPSIKQQGFSKTANQNYKIPATGSDSLIKYETHSTLDGRWSALTPGPPMATAGPADSKFSNSQLIFAGPKQNGNTATVPGTLIFTSEEELAATNATDTDMWGNLPGGDQSNSNLPTVDRLTALGAVPGMVWQNRDIYYQGPIWAKIPHTDGHFHPSPLIGGFGLKHPPPQIFIKNTPVPANPATTFSSTPVNSFITQYSTGQVSVQIDWEIQKERSKRWNPEVQFTSNYGQQNSLLWAPDAAGKYTEPRAIGTRYLTHHL

SEQ ID NO: 66 - protein, 734 aa, Adeno-associated virus 4
MTDGYLPDWLEDNLSEGVREWWALQPGAPKPKANQQHQDNARGLVLPGYKYLGPGNGLDKGEPVNAADAAALEHDKAYDQQLKAGDNPYLKYNHADAEFQQRLQGDTSFGGNLGRAVFQAKKRVLEPLGLVEQAGETAPGKKRPLIESPQQPDSSTGIGKKGKQPAKKKLVFEDETGAGDGPPEGSTSGAMSDDSEMRAAAGGAAVEGGQGADGVGNASGDWHCDSTWSEGHVTTTSTRTWVLPTYNNHLYKRLGESLQSNTYNGFSTPWGYFDFNRFHCHFSPRDWQRLINNNWGMRPKAMRVKIFNIQVKEVTTSNGETTVANNLTSTVQIFADSSYELPYVMDAGQEGSLPPFPNDVFMVPQYGYCGLVTGNTSQQQTDRNAFYCLEYFPSQMLRTGNNFEITYSFEKVPFHSMYAHSQSLDRLMNPLIDQYLWGLQSTTTGTTLNAGTATTNFTKLRPTNFSNFKKNWLPGPSIKQQGFSKTANQNYKIPATGSDSLIKYETHSTLDGRWSALTPGPPMATAGPADSKFSNSQLIFAGPKQNGNTATVPGTLIFTSEEELAATNATDTDMWGNLPGGDQSNSNLPTVDRLTALGAVPGMVWQNRDIYYQGPIWAKIPHTDGHFHPSPLIGGFGLKHPPPQIFIKNTPVPANPATTFSSTPVNSFITQYSTGQVSVQIDWEIQKERSKRWNPEVQFTSNYGQQNSLLWAPDAAGKYTEPRAIGTRYLTHHL

SEQ ID NO: 67 - protein, 598 aa, Adeno-associated virus 4
TAPGKKRPLIESPQQPDSSTGIGKKGKQPAKKKLVFEDETGAGDGPPEGSTSGAMSDDSEMRAAAGGAAVEGGQGADGVGNASGDWHCDSTWSEGHVTTTSTRTWVLPTYNNHLYKRLGESLQSNTYNGFSTPWGYFDFNRFHCHFSPRDWQRLINNNWGMRPKAMRVKIFNIQVKEVTTSNGETTVANNLTSTVQIFADSSYELPYVMDAGQEGSLPPFPNDVFMVPQYGYCGLVTGNTSQQQTDRNAFYCLEYFPSQMLRTGNNFEITYSFEKVPFHSMYAHSQSLDRLMNPLIDQYLWGLQSTTTGTTLNAGTATTNFTKLRPTNFSNFKKNWLPGPSIKQQGFSKTANQNYKIPATGSDSLIKYETHSTLDGRWSALTPGPPMATAGPADSKFSNSQLIFAGPKQNGNTATVPGTLIFTSEEELAATNATDTDMWGNLPGGDQSNSNLPTVDRLTALGAVPGMVWQNRDIYYQGPIWAKIPHTDGHFHPSPLIGGFGLKHPPPQIFIKNTPVPANPATTFSSTPVNSFITQYSTGQVSVQIDWEIQKERSKRWNPEVQFTSNYGQQNSLLWAPDAAGKYTEPRAIGTRYLTHHL

SEQ ID NO: 68 - DNA, 129 bp, Adeno-associated virus 4
ttggccactccctctatgcgcgctcgctcactcactcggccctgcggccagaggccggcagtctggagacctttggtgtccagggcagggccgagtgagtgagcgagcgcgcatagagggagtggccaa

SEQ ID NO: 69 - DNA, 125 bp, Adeno-associated virus 4
ttggccactccctctatgcgcgctcgctcactcactcggccctggagaccaaaggtctccagactgccggcctctggccggcagggccgagtgagtgagcgagcgcgcatagagggagtggccaa

SEQ ID NO: 70 - DNA, 4768 bp, Adeno-associated virus 4
  modified_base (3009)..(3009): Unknown
ttggccactccctctatgcgcgctcgctcactcactcggccctggagaccaaaggtctccagactgccggcctctggccggcagggccgagtgagtgagcgagcgcgcatagagggagtggccaactccatcatctaggtttgcccactgacgtcaatgtgacgtcctagggttagggaggtccctgtattagcagtcacgtgagtgtcgtatttcgcggagcgtagcggagcgcataccaagctgccacgtcacagccacgtggtccgtttgcgacagtttgcgacaccatgtggtcaggagggtatataaccgcgagtgagccagcgaggagctccattttgcccgcgaattttgaacgagcagcagccatgccggggttctacgagatcgtgctgaaggtgcccagcgacctggacgagcacctgcccggcatttctgactcttttgtgagctgggtggccgagaaggaatgggagctgccgccggattctgacatggacttgaatctgattgagcaggcacccctgaccgtggccgaaaagctgcaacgcgagttcctggtcgagtggcgccgcgtgagtaaggccccggaggccctcttctttgtccagttcgagaagggggacagctacttccacctgcacatcctggtggagaccgtgggcgtcaaatccatggtggtgggccgctacgtgagccagattaaagagaagctggtgacccgcatctaccgcggggtcgagccgcagcttccgaactggttcgcggtgaccaagacgcgtaatggcgccggaggcgggaacaaggtggtggacgactgctacatccccaactacctgctccccaagacccagcccgagctccagtgggcgtggactaacatggaccagtatataagcgcctgtttgaatctcgcggagcgtaaacggctggtggcgcagcatctgacgcacgtgtcgcagacgcaggagcagaacaaggaaaaccagaaccccaattctgacgcgccggtcatcaggtcaaaaacctccgccaggtacatggagctggtcgggtggctggtggaccgcgggatcacgtcagaaaagcaatggatccaggaggaccaggcgtcctacatctccttcaacgccgcctccaactcgcggtcacaaatcaaggccgcgctggacaatgcctccaaaatcatgagcctgacaaagacggctccggactacctggtgggccagaacccgccggaggacatttccagcaaccgcatctaccgaatcctcgagatgaacgggtacgatccgcagtacgcggcctccgtcttcctgggctgggcgcaaaagaagttcgggaagaggaacaccatctggctctttgggccggccacgacgggtaaaaccaacatcgcggaagccatcgcccacgccgtgcccttctacggctgcgtgaactggaccaatgagaactttccgttcaacgattgcgtcgacaagatggtgatctggtgggaggagggcaagatgacggccaaggtcgtagagagcgccaaggccatcctgggcggaagcaaggtgcgcgtggaccaaaagtgcaagtcatcggcccagatcgacccaactcccgtgatcgtcacctccaacaccaacatgtgcgcggtcatcgacggaaactcgaccaccttcgagcaccaacaaccactccaggaccggatgttcaagttcgagctcaccaagcgcctggagcacgactttggcaaggtcaccaagcaggaagtcaaagactttttccggtgggcgtcagatcacgtgaccgaggtgactcacgagttttacgtcagaaagggtggagctagaaagaggcccgcccccaatgacgcagatataagtgagcccaagcgggcctgtccgtcagttgcgcagccatcgacgtcagacgcggaagctccggtggactacgcggacaggtaccaaaacaaatgttctcgtcacgtgggtatgaatctgatgctttttccctgccggcaatgcgagagaatgaatcagaatgtggacatttgcttcacgcacggggtcatggactgtgccgagtgcttccccgtgtcagaatctcaacccgtgtctgtcgtcagaaagcggacgtatcagaaactgtgtccgattcatcacatcatggggagggcgcccgaggtggcctgctcggcctgcgaactggccaatgtggacttggatgactgtgacatggaacaataaatgactcaaaccagatatgactgacggttaccttccagattggctagaggacaacctctctgaaggcgttcgagagtggtgggcgctgcaacctggagcccctaaacccaaggcaaatcaacaacatcaggacaacgctcggggtcttgtgcttccgggttacaaatacctcggacccggcaacggactcgacaagggggaacccgtcaacgcagcggacgcggcagccctcgagcacgacaaggcctacgaccagcagctcaaggccggtgacaacccctacctcaagtacaaccacgccgacgcggagttccagcagcggcttcagggcgacacaccgtttgggggcaacctcggcagagcagtcttccaggccaaaaagagggttcttgaacctcttggtctggttgagcaagcgggtgagacggctcctggaaagaagagaccgttgattgaatccccccagcagcccgactcctccacgggtatcggcaaaaaaggcaagcagccggctaaaaagaagctcgttttcgaagacgaaactggagcaggcgacggaccccctgagggatcaacttccggagccatgtctgatgacagtgagatgcgtgcagcagctggcggagctgcagtcgagggsggacaaggtgccgatggagtgggtaatgcctcgggtgattggcattgcgattccacctggtctgagggccacgtcacgaccaccagcaccagaacctgggtcttgcccacctacaacaaccacctntacaagcgactcggagagagcctgcagtccaacacctacaacggattctccaccccctggggatactttgacttcaaccgcttccactgccacttctcaccacgtgactggcagcgactcatcaacaacaactggggcatgcgacccaaagccatgcgggtcaaaatcttcaacatccaggtcaaggaggtcacgacgtcgaacggcgagacaacggtggctaataaccttaccagcacggttcagatctttgcggactcgtcgtacgaactgccgtacgtgatggatgcgggtcaagagggcagcctgcctccttttcccaacgacgtctttatggtgccccagtacggctactgtggactggtgaccggcaacacttcgcagcaacagactgacagaaatgccttctactgcctggagtactttccttcgcagatgctgcggactggcaacaactttgaaattacgtacagttttgagaaggtgcctttccactcgatgtacgcgcacagccagagcctggaccggctgatgaaccctctcatcgaccagtacctgtggggactgcaatcgaccaccaccggaaccaccctgaatgccgggactgccaccaccaactttaccaagctgcggcctaccaacttttccaactttaaaaagaactggctgcccgggccttcaatcaagcagcagggcttctcaaagactgccaatcaaaactacaagatccctgccaccgggtcagacagtctcatcaaatacgagacgcacagcactctggacggaagatggagtgccctgacccccggacctccaatggccacggctggacctgcggacagcaagttcagcaacagccagctcatctttgcggggcctaaacagaacggcaacacggccaccgtacccgggactctgatcttcacctctgaggaggagctggcagccaccaacgccaccgatacggacatgtggggcaacctacctggcggtgaccagagcaacagcaacctgccgaccgtggacagactgacagccttgggagccgtgcctggaatggtctggcaaaacagagacatttactaccagggtcccatttgggccaagattcctcataccgatggacactttcacccctcaccgctgattggtgggtttgggctgaaacacccgcctcctcaaatttttatcaagaacaccccggtacctgcgaatcctgcaacgaccttcagctctactccggtaaactccttcattactcagtacagcactggccaggtgtcggtgcagattgactgggagatccagaaggagcggtccaaacgctggaaccccgaggtccagtttacctccaactacggacagcaaaactctctgttgtgggctcccgatgcggctgggaaatacactgagcctagggctatcggtacccgctacctcacccaccacctgtaataacctgttaatcaataaaccggtttattcgtttcagttgaactttggtctccgtgtccttcttatcttatctcgtttccatggctactgcgtacataagcagcggcctgcggcgcttgcgcttcgcggtttacaactgccggttaatcagtaacttctggcaaaccatgatgatggagttggccactccctctatgcgcgctcgctcactcactcggccctggagaccaaaggtctccagactgccggcctctggccggcagggccgagtgagtgagcgagcgcgcatagagggagtggccaa

SEQ ID NO: 71 - DNA, 3098 bp, Artificial Sequence
  source: /note="Description of Artificial Sequence: Synthetic polynucleotide"
gaattcgccctttctacggctgcgtcaactggaccaatgagaactttcccttcaacgattgcgtcgacaagatggtgatctggtgggaggagggcaagatgacggccaaggtcgtggagtccgccaaggccattctcggcggcagcaaggtgcgcgtggaccaaaagtgcaagtcttccgcccagatcgatcccacccccgtgatcgtcacttccaacaccaacatgtgcgctgtgattgacgggaacagcaccaccttcgagcaccagcagccgttacaagaccggatgttcaaatttgaactcacccgccgtctggagcacgactttggcaaggtgacaaagcaggaagtcaaagagttcttccgctgggcgcaggatcacgtgaccgaggtggcgcatgagttctacgtcagaaagggtggagccaacaagagacccgcccccgatgacgcggataaaagcgagcccaagcgggcctgcccctcagtcgcggatccatcgacgtcagacgcggaaggagctccggtggactttgccgacaggtaccaaaacaaatgttctcgtcacgcgggcatgcttcagatgctgtttccctgcaagacatgcgagagaatgaatcagaatttcaacatttgcttcacgcacgggaccagagactgttcagaatgtttccccggcgtgtcagaatctcaaccggtcgtcagaaagaggacgtatcggaaactctgtgccattcatcatctgctggggcgggctcccgagattgcttgctcggcctgcgatctggtcaacgtggacctggatgaccgtgtttctgagcaataaatgacttaaaccaggtatggctgccgatggttatcttccagattggctcgaggacaacctctctgagggcattcgcgagtggtgggacttgaaacctggagccccgaaacccaaagccaaccagcaaaagcaggacgacggccggggtctggtgcttcctggctacaagtacctcggacccttcaacggactcgacaagggagagccggtcaacgaggcagacgccgcggccctcgagcacgacaaggcctacgacaagcagctcgagcagggggacaacccgtacctcaagtacaaccacgccgacgccgagtttcaggagcgtcttcaagaagatacgtcttttgggggcaacctcgggcgagcagtcttccaggccaagaagcgggttctcgaacctctcggtctggttgaggaaggcgctaagacggctcctggaaagaagagacccatagaatcccccgactcctccacgggcatcggcaagaaaggccagcagcccgctaaaaagaagctcaactttgggcagactggcgactcagagtcagtgcccgacccccaacctctcggagaacctcccgccgcgccctcaggtctgggatctggtacaatggctgcaggcggtggcgcaccaatggcagacaataacgaaggcgccgacggagtgggtaatgcctccggaaattggcattgcgattccacatggctgggcgacagagtcatcaccaccagcacccgcacctgggccctgcccacctacaacaaccacctctacaagcagatatcaagtcagagcggggctaccaacgacaaccacttcttcggctacagcaccccctggggctattttgacttcaacagattccactgccacttctcaccacgtgactggcagcgactcatcaacaacaactggggattccggcccagaaagctgcggttcaagttgttcaacatccaggtcaaggaggtcacgacgaacgacggcgttacgaccatcgctaataaccttaccagcacgattcaggtcttctcggactcggagtaccaactgccgtacgtcctcggctctgcgcaccagggctgcctccctccgttccctgcggacgtgttcatgattcctcagtacggatatctgactctaaacaacggcagtcagtctgtgggacgttcctccttctactgcctggagtactttccttctcagatgctgagaacgggcaataactttgaattcagctacacctttgaggaagtgcctttccacagcagctatgcgcacagccagagcctggaccggctgatgaatcccctcatcgaccagtacctgtactacctggcccggacccagagcactacggggtccacaagggagctgcagttccatcaggctgggcccaacaccatggccgagcaatcaaagaactggctgcccggaccctgttatcggcagcagagactgtcaaaaaacatagacagcaacaacaacagtaactttgcctggaccggggccactaaataccatctgaatggtagaaattcattaaccaacccgggcgtagccatggccaccaacaaggacgacgaggaccagttctttcccatcaacggagtgctggtttttggcgaaacgggggctgccaacaagacaacgctggaaaacgtgctaatgaccagcgaggaggagatcaaaaccaccaatcccgtggctacagaagaatacggtgtggtctccagcaacctgcaatcgtctacggccggaccccagacacagactgtcaacagccagggggctctgcccggcatggtctggcagaaccgggacgtgtacctgcagggtcccatctgggccaaaattcctcacacggacggcaactttcacccgtctcccctgatgggcggatttggactcaaacacccgcctcctcaaattctcatcaaaaacaccccggtacctgctaatcctccagaggtgtttactcctgccaagtttgcctcatttatcacgcagtacagcaccggccaggtcagcgtggagatcgagtgggaactgcagaaagaaaacagcaaacgctggaatccagagattcagtacacctcaaattatgccaagtctaataatgtggaatttgctgtcaacaacgaaggggtttatactgagcctcgccccattggcacccgttacctcacccgtaacctgtaattgcctgttaatcaataaaccggttaattcgtttcagttgaactttggtctctgcgaagggcgaattc

SEQ ID NO: 72 - protein, 728 aa, Artificial Sequence
  source: /note="Description of Artificial Sequence: Synthetic polypeptide"
MAADGYLPDWLEDNLSEGIREWWDLKPGAPKPKANQQKQDDGRGLVLPGYKYLGPFNGLDKGEPVNEADAAALEHDKAYDKQLEQGDNPYLKYNHADAEFQERLQEDTSFGGNLGRAVFQAKKRVLEPLGLVEEGAKTAPGKKRPIESPDSSTGIGKKGQQPAKKKLNFGQTGDSESVPDPQPLGEPPAAPSGLGSGTMAAGGGAPMADNNEGADGVGNASGNWHCDSTWLGDRVITTSTRTWALPTYNNHLYKQISSQSGATNDNHFFGYSTPWGYFDFNRFHCHFSPRDWQRLINNNWGFRPRKLRFKLFNIQVKEVTTNDGVTTIANNLTSTIQVFSDSEYQLPYVLGSAHQGCLPPFPADVFMIPQYGYLTLNNGSQSVGRSSFYCLEYFPSQMLRTGNNFEFSYTFEEVPFHSSYAHSQSLDRLMNPLIDQYLYYLARTQSTTGSTRELQFHQAGPNTMAEQSKNWLPGPCYRQQRLSKNIDSNNNSNFAWTGATKYHLNGRNSLTNPGVAMATNKDDEDQFFPINGVLVFGETGAANKTTLENVLMTSEEEIKTTNPVATEEYGVVSSNLQSSTAGPQTQTVNSQGALPGMVWQNRDVYLQGPIWAKIPHTDGNFHPSPLMGGFGLKHPPPQILIKNTPVPANPPEVFTPAKFASFITQYSTGQVSVEIEWELQKENSKRWNPEIQYTSNYAKSNNVEFAVNNEGVYTEPRPIGTRYLTRNL

SEQ ID NO: 73 - DNA, 2495 bp, Artificial Sequence
  source: /note="Description of Artificial Sequence: Synthetic polynucleotide"
gaattcgccctttctacggctgcgtcaactagaccaatgagaactttcccttcaacgattgcgtcgacaagatggtgatctggtgggaggagggcaagatgacggccaaggtcgtggagtccgccaaggccattcatcatctgctggggcgggctcccgagattgcttgctcggcctgcgatctggtcaacgtggacctggatgactgtgtttctgagcaataaatgacttaaaccaggtatggctgccgatggttatcttccagattggctcgaggacaacctctctgagggcattcgcgagtggtgggacttgaaacctggagccccgaaacccaaagccaaccagcaaaagcaggacgacggccggggtctggtgcttcctggctacaagtacctcggacccttcaacggactcgacaagggagagccggtcaacgaggcagacgccgcggccctcgagcacgacaaggcctacgacaagcagctcgagcagggggacaacccgtacctcaagtacaaccacgccgacgccgagtttcaggagcgtcttcaagaagatacgtcttttgggggcaacctcgggcgagcagtcttccaggccaagaagcgggttctcgaacctctcggtctggttgaggaaggcgctaagacggctcctggaaagaagagacccatagaatcccccgactcctccacgggcatcggcaagaaaggccagcagcccgctaaaaagaagctcaactttgggcagactggcgactcagagtcagtgcccgaccctcaaccaatcggagaaccccccgcaggcccctctggtctgggatctggtacaatggctgcaggcggtggcgctccaatggcagacaataacgaaggcgccgacggagtgggtaatgcctccggaaattggcattgcgattccacatggctgggcgacagagtcatcaccaccagcacccgcacctgggccctgcccacctacaacaaccacctctacaagcagatatcaagtcagagcggggctaccaacgacaaccacttcttcggctacagcaccccctggggctattttgacttcaacagattccactgccacttctcaccacgtgactggcagcgactcatcaacaacaactggggattccggcccagaaagctgcggttcaagttgttcaacatccaggtcaaggaggtcacgacgaacgacggcgttacgaccatcgctaataaccttaccagcacgattcaggtcttctcggactcggagtaccaactgccgtacgtcctcggctctgcgcaccagggctgcctccctccgttccctgcggacgtgttcatgattcctcagtacggatatctgactctaaacaacggcagtcagtctgtgggacgttcctccttctactgcctggagtactttccttctcagatgctgagaacgggcaataactttgaattcagctacacctttgaggaagtgcctttccacagcagctatgcgcacagccagagcctggaccggctgatgaatcccctcatcgaccagtacctgtactacctggcccggacccagagcactacggggtccacaagggagctgcagttccatcaggctgggcccaacaccatggccgagcaatcaaagaactggctgcccggaccctgttatcggcagcagagactgtcaaaaaacatagacagcaacaacaccagtaactttgcctggaccggggccactaaataccatctgaatggtagaaattcattaaccaacccgggcgtagccatggccaccaacaaggacgacgaggaccagttctttcccatcaacggagtgctggtttttggcaaaacgggggctgccaacaagacaacgctggaaaacgtgctaatgaccagcgaggaggagatcaaaaccaccaatcccgtggctacagaacagtacggtgtggtctccagcaacctgcaatcgtctacggccggaccccagacacagactgtcaacagccagggggctctgcccggcatggtctggcagaaccgggacgtgtacctgcagggtcccatctgggccaaaattcctcacacggacggcaactttcacccgtctcccctgatgggcggatttggactcaaacacccgcctcctcaaattctcatcaaaaacaccccggtacctgctaatcctccagaggtgtttactcctgccaagtttgcctcatttatcacgcagtacagcaccggccaggtcagcgtggagatcgagtgggaactgcagaaagaaaacagcaaacgctggaatccagagattcagtacacctcaaattatgccaagtctaataatgtggaatttgctgtcaacaacgaaggggtttatactgagcctcgccccattggcacccgttacctcacccgtaacctgtaattgcctgttaatcaataaaccggttaattcgtttcagttgaactttggtctctgcgaagggcgaattc

SEQ ID NO: 74 - protein, 728 aa, Artificial Sequence
  source: /note="Description of Artificial Sequence: Synthetic polypeptide"
MAADGYLPDWLEDNLSEGIREWWDLKPGAPKPKANQQKQDDGRGLVLPGYKYLGPFNGLDKGEPVNEADAAALEHDKAYDKQLEQGDNPYLKYNHADAEFQERLQEDTSFGGNLGRAVFQAKKRVLEPLGLVEEGAKTAPGKKRPIESPDSSTGIGKKGQQPAKKKLNFGQTGDSESVPDPQPIGEPPAGPSGLGSGTMAAGGGAPMADNNEGADGVGNASGNWHCDSTWLGDRVITTSTRTWALPTYNNHLYKQISSQSGATNDNHFFGYSTPWGYFDFNRFHCHFSPRDWQRLINNNWGFRPRKLRFKLFNIQVKEVTTNDGVTTIANNLTSTIQVFSDSEYQLPYVLGSAHQGCLPPFPADVFMIPQYGYLTLNNGSQSVGRSSFYCLEYFPSQMLRTGNNFEFSYTFEEVPFHSSYAHSQSLDRLMNPLIDQYLYYLARTQSTTGSTRELQFHQAGPNTMAEQSKNWLPGPCYRQQRLSKNIDSNNTSNFAWTGATKYHLNGRNSLTNPGVAMATNKDDEDQFFPINGVLVFGKTGAANKTTLENVLMTSEEEIKTTNPVATEQYGVVSSNLQSSTAGPQTQTVNSQGALPGMVWQNRDVYLQGPIWAKIPHTDGNFHPSPLMGGFGLKHPPPQILIKNTPVPANPPEVFTPAKFASFITQYSTGQVSVEIEWELQKENSKRWNPEIQYTSNYAKSNNVEFAVNNEGVYTEPRPIGTRYLTRNL

SEQ ID NO: 75 - DNA, 2504 bp, Artificial Sequence
  source: /note="Description of Artificial Sequence: Synthetic polynucleotide"
gaattcgccctttctacggctgcgtcaactggaccaatgagaactttcccttcaacgattgcgtcgacaagatggtgatctggtgggaggagggcaagatgacggccaaggtcgtggagtccgccaaggccattcatcatctgctggggcgggctcccgagattgcttgctcggcctgcgatctggtcaacgtggacctggatgactgtgtttctgagcaataaatgacttaaaccaggtatggctgccgatggttatcttccagattggctcgaggacaacctctctgagggcattcgcgagtggtgggacttgaaacctggagccccgaaacccaaagccaaccagcaaaagcaggacgacggccggggtctggtgcttcctggctacaagtacctcggacccttcaacggactcgacaagggagagccggtcaacgaggcagacgccgcggccctcgagcacgacaaggcctacgacaagcagctcgagcagggggacaacccgtacctcaagtacaaccacgccgacgccgagtttcaggagcgtcttcaagaagatacgtcttttgggggcaacctcgggcgagcagtcttccaggccaagaagcgggttctcgaacctctcggtctggttgaggaaggcgctaagacggctcctggaaagaagagacccatagaatcccccgactcctccacgggcatcggcaagaaaggccagcagcccgctaaaaagaagctcaactttgggcagactggcgactcagagtcagtgcccgaccctcaaccaatcggagaaccccccgcaggcccctctggtctgggatctggtacaatggctgcaggcggtggcgctccaatggcagacaataacgaaggcgccgacggagtgggtaatgcctccggaaattggcattgcgattccacatggctgggcgacagagtcatcaccaccagcacccgcacctgggccctgcccacctacaacaaccacctctacaagcagatatcaagtcagagcggggctaccaacgacaaccacttcttcggctacagcaccccctggggctattttgacttcaacagattccactgccacttctcatcacgtgactggcagcgactcatcaacaacaactggggattccggcccaagagactcaacttcaagctcttcaacatccaggtcaaggaggtcacgcagaatgaaggcaccaagaccatcgccaataaccttaccagcacgattcaggtctttacggactcggaataccggctcccgtacgtcctcggctctgcgcaccagggctgcctgcctccgttcccggcggacgtcttcatgattcctcagtacgggtacctgactctgaacaacggcagtcaggccgtgggccgttcctccttctactgcctggagtactttccttctcaaatgctgagaacgggcaacaactttgagttcagctaccagtttgaggacgtgccttttcacagcagctacgcgcacagccaaagcctggaccggctgatgaaccccctcatcgaccagtacctgtactacctgtctcggactcagtccacgggaggtaccgcaggaactcagcagttgctattttctcaggccgggcctaataacatgtcggctcaggccaaaaactggctacccgggccctgctaccggcagcaacgcgtctccacgacactgtcgcaaaataacaacagcaactttgcttggaccggtgccaccaagtatcatctgaatggcagagactctctggtaaatcccggtgtcgctatggcaacgcacaaggacgacgaagagcgattttttccatccagcggagtcttgatgtttgggaaacagggagctggaaaagacaacgtggactatagcagcgttatgctaaccagtgaggaagaaatcaaaaccaccaacccagtggccacagaacagtacggcgtggtggccgataacctgcaacagcaaaacgccgctcctattgtaggggccgtcaacagtcaaggagccttacctggcatggtctggcagaaccgggacgtgtacctgcagggtcctatctgggccaagattcctcacacggacggcaactttcatccttcgccgctgatgggaggctttggactgaaacacccgcctcctcagatcctgattaagaatacacctgttcccgcggatcctccaactaccttcagtcaagccaagccggcgtcgttcatcacgcagtacagcaccggacaggtcagcgtggaaattgaatgggagctgcagaaagagaacagcaagcgctggaacccagagattcagtatacttccaactactacaaatctacaaatgtggactttgctgtcaatactgagggtacttattcagagcctcgccccattggcacccgttacctcacccgtaacctgtaattgcctgttaatcaataaaccggttaattcgtttcagttgaactttggtctctgcgaagggcgaattc

SEQ ID NO: 76 - protein, 731 aa, Artificial Sequence
  source: /note="Description of Artificial Sequence: Synthetic polypeptide"
MAADGYLPDWLEDNLSEGIREWWDLKPGAPKPKANQQKQDDGRGLVLPGYKYLGPFNGLDKGEPVNEADAAALEHDKAYDKQLEQGDNPYLKYNHADAEFQERLQEDTSFGGNLGRAVFQAKKRVLEPLGLVEEGAKTAPGKKRPIESPDSSTGIGKKGQQPAKKKLNFGQTGDSESVPDPQPIGEPPAGPSGLGSGTMAAGGGAPMADNNEGADGVGNASGNWHCDSTWLGDRVITTSTRTWALPTYNNHLYKQISSQSGATNDNHFFGYSTPWGYFDFNRFHCHFSSRDWQRLINNNWGFRPKRLNFKLFNIQVKEVTQNEGTKTIANNLTSTIQVFTDSEYRLPYVLGSAHQGCLPPFPADVFMIPQYGYLTLNNGSQAVGRSSFYCLEYFPSQMLRTGNNFEFSYQFEDVPFHSSYAHSQSLDRLMNPLIDQYLYYLSRTQSTGGTAGTQQLLFSQAGPNNMSAQAKNWLPGPCYRQQRVSTTLSQNNNSNFAWTGATKYHLNGRDSLVNPGVAMATHKDDEERFFPSSGVLMFGKQGAGKDNVDYSSVMLTSEEEIKTTNPVATEQYGVVADNLQQQNAAPIVGAVNSQGALPGMVWQNRDVYLQGPIWAKIPHTDGNFHPSPLMGGFGLKHPPPQILIKNTPVPADPPTTFSQAKPASFITQYSTGQVSVEIEWELQKENSKRWNPEIQYTSNYYKSTNVDFAVNTEGTYSEPRPIGTRYLTRNL

SEQ ID NO: 77 - DNA, 3128 bp, Artificial Sequence
  source: /note="Description of Artificial Sequence: Synthetic polynucleotide"
gaattcgccctttctacggctgcgtcaactggaccaatgagaactttcccttcaacgattgcgtcgacaagatggtgatctggtgggaggagggcaagatgacggccaaggtcgtggagtccgccaaggccattctcggcggcagcaaggtgcgcgtggaccaaaagtgcaagtcttccgcccagatcgatcccacccccgtgatcgtcacttccaacaccaacatgtgcgccgtgattgacgggaacagcaccaccttcgagcaccagcagccgttacaagaccggatgttcaaatttgaactcacccgccgtctggagcacgactttggcaaggtgacaaagcaggaagtcaaagagttcttccgctgggcgcaggatcacgtgaccgaggtggcgcatgagttctacgtcagaaagggtggagccaacaagagacccgcccccgatgacgcggataaaagcgagcccaagcgggcctgcccctcagtcgcggatccatcgacgtcagacgcggaaggagctccggtggactttgccgacaggtaccaaaacaaatgttctcgtcacgcgggcatgcttcagatgctgtttccctgcaagacatgcgagagaatgaatcagaatttcaacatttgcttcacgcacgggaccagagactgttcagaatgtttccccggcgtgtcagaatctcaaccggtcgtcagaaagaggacgtatcggaaactctgtgccattcatcatctgctagggcgggctcccgagattgcttgctcggcctgcgatctggtcaacgtggacctggatgactgtgtttctgagcaataaatgacttaaaccaggtatggctgccgatggttatcttccagattggctcgaggacaacctctctgagggcattcgcgagtggtgggacttgaaacctggagccccgaaacccaaagccaaccagcaaaagcaggacgacggccggggtctggtgcttcctggctacaagtacctcggacccttcaacggactcgacaagggggagcccgtcaacgcggcggacgcagcggccctcgagcacgacaaggcctacgaccagcagctcaaagcgggtgacaatccgtacctgcggtataaccacgccgacgccgagtttcaggagcgtctgcaagaagatacgtcttttgggggcaacctcgggcgagcagtcttccaggccaagaagcgggttctcgaacctctcggtctggttgaggaaggcgctaagacggctcctggaaagaagagaccggtagagccatcaccccagcgttctccagactcctctacgggcatcggcaagacaggccagcagcccgcgaaaaagagactcaactttgggcagactggcgactcagagtcagtgcccgaccctcaaccaatcggagaaccccccgcaggcccctctggtctgggatctggtacaatggctgcaggcggtggcgctccaatggcagacaataacgaaggcgccgacggagtgggtagttcctcaggaaattggcattgcgattccacatggctgggcgacagagtcatcaccaccagcacccgaacctgggccctccccacctacaacaaccacctctacaagcaaatctccaacgggacatcgggaggaagcaccaacgacaacacctacttcggctacagcaccccctgggggtattttgactttaacagattccactgccacttctcaccacgtgactggcagcgactcatcaacaacaactggggattccggcccaagagactcaacttcaagctcttcaacatccaggtcaaggaggtcacgcagaatgaaggcaccaagaccatcgccaataaccttaccagcacgattcaggtctttacggactcggaataccagctcccgtacgtcctcggctctgcgcaccagggctgcctgcctccgttcccggcggacgtcttcatgattcctcagtacgggtacctgactctgaacaacggcagtcaggccgtgggccgttcctccttctactgcctggagtactttccttctcaaatgctgagaacgggcaacaactttgagttcagctaccagtttgaggacgtgccttttcacagcagctacgcgcacagccaaagcctggaccggctgatgaaccccctcatcgaccagtacctgtactacctgtctcggactcagtccacgggaggtaccgcaggaactcagcagttgctattttctcaggccgggcctaataacatgtcggctcaggccaaaaactggctacccgggccctgctaccggcagcaacgcgtctccacgacactgtcgcaaaataacaacagcaactttgcttggaccggtgccaccaagtatcatctgaatggcagagactctctggtaaatcccggtgtcgctatggcaacgcacaaggacgacgaagagcgattttttccatccagcggagtcttgatgtttgggaaacagggagctggaaaagacaacgtggactatagcagcgttatgctaaccagtgaggaagaaatcaaaaccaccaacccagtggccacagaacagtacggcgtggtggccgataacctgcaacagcaaaacgccgctcctattgtaggggccgtcaacagtcaaggagccttacctggcatggtctggcagaaccgggacgtgtacctgcagggtcctatctgggccaagattcctcacacggacggcaactttcatccttcgccgctgatgggaggctttggactgaaacacccgcctcctcagatcctgattaagaatacacctgttcccgcggatcctccaactaccttcagtcaagccaagctggcgtcgttcatcacgcagtacagcaccggacaggtcagcgtggaaattgaatgggagctgcagaaagagaacagcaagcgctggaacccagagattcagtatacttccaactactacaaatctacaaatgtggactttgctgtcaatactgagggtacttattcagagcctcgccccattggcacccgttacctcacccgtaacctgtaattgcctgttaatcaataaaccggctaattcgtttcagttgaactttggtctctgcgaagggcgaattc

SEQ ID NO: 78 - protein, 738 aa, Artificial Sequence
  source: /note="Description of Artificial Sequence: Synthetic polypeptide"
MAADGYLPDWLEDNLSEGIREWWDLKPGAPKPKANQQKQDDGRGLVLPGYKYLGPFNGLDKGEPVNAADAAALEHDKAYDQQLKAGDNPYLRYNHADAEFQERLQEDTSFGGNLGRAVFQAKKRVLEPLGLVEEGAKTAPGKKRPVEPSPQRSPDSSTGIGKTGQQPAKKRLNFGQTGDSESVPDPQPIGEPPAGPSGLGSGTMAAGGGAPMADNNEGADGVGSSSGNWHCDSTWLGDRVITTSTRTWALPTYNNHLYKQISNGTSGGSTNDNTYFGYSTPWGYFDFNRFHCHFSPRDWQRLINNNWGFRPKRLNFKLFNIQVKEVTQNEGTKTIANNLTSTIQVFTDSEYQLPYVLGSAHQGCLPPFPADVFMIPQYGYLTLNNGSQAVGRSSFYCLEYFPSQMLRTGNNFEFSYQFEDVPFHSSYAHSQSLDRLMNPLIDQYLYYLSRTQSTGGTAGTQQLLFSQAGPNNMSAQAKNWLPGPCYRQQRVSTTLSQNNNSNFAWTGATKYHLNGRDSLVNPGVAMATHKDDEERFFPSSGVLMFGKQGAGKDNVDYSSVMLTSEEEIKTTNPVATEQYGVVADNLQQQNAAPIVGAVNSQGALPGMVWQNRDVYLQGPIWAKIPHTDGNFHPSPLMGGFGLKHPPPQILIKNTPVPADPPTTFSQAKLASFITQYSTGQVSVEIEWELQKENSKRWNPEIQYTSNYYKSTNVDFAVNTEGTYSEPRPIGTRYLTRNL

SEQ ID NO: 79 - DNA, 3084 bp, Artificial Sequence
  source: /note="Description of Artificial Sequence: Synthetic polynucleotide"
gaattcgccctttctacggctgcatcaactggaccaatgagaactttcccttcaacgattgcgtcgacaagatggtgatctggtgggaggagggcaagatgacggccaaggtcgtggagtccgccaaggccattctcggcggcagcaaggtgcgcgtggaccaaaagtgcaagtcgtccgcccagatcgaccccacccccgtgatcgtcacctccaacaccaacatgtgcgccgtgattgacgggaacagcaccaccttcgagcaccagcagccgttgcaggaccggatgttcaagttcgaactcacccgccgtctggagcacgactttggcaaggtgaccaagcaggaagtcaaagagttcttccgctgggcgcaggatcacgtgaccgaggtggcgcatgagttctacgtcagaaagggcggagccagcaaaagacccgcccccgatgacgcggatataagcgagcccaagcgggcctgcccctcagtcgcggatccatcgacgtcagacgcggaaggagctccggtggactttgccgacaggtaccaaaacaaatgttctcgtcacgcgggcatgcttcagatgctgtttccctgcaaaacgtgcgagaaaatgaatcagaatttcaacatttgcttcacgcacggggtcagagactgctcagaatgtttccccggtgcatcagaatctcaaccggtcgtcagaaaaaaaacgtatcagaaactgtgtgccattcatcatctgctggggcgggcacccgagattgcttgctcggcctgcgatctggtcaacgtggacctggacgactgtgtttctgagcaataaatgacttaaaccaggtatggctgccgatggttatcttccagattggcttgaggacaacctctctgagggcattcgcgagtggtgggacctgaaacctggagccccgaaacccaaagccaaccagcaaaagcaggacgacggccggggtctggtgcttcctggctacaagtacctcggacccttcaacggactcgacaagggggagcccgtcaacgcggcggacgcagcggccctcgagcacgacaaggcctacgaccagcagctcaaagcgggtgacaatccgtacctgcggtataaccacgccgacgccgagtttcaggagcgtctgcaagaagatacgtcttttgggggcaacctcgggcgagcagtcttccaggccaagaagcgggttctcgaacctctcggtctggttgaggaaggcgctaagacggctcctggaaagaagagaccggtagagccatcacctcagcgttcccccgactcctccacgggcatcggcaagaaaggccaccagcccgcgagaaagagactgaactttgggcagactggcgactcggagtcagtccccgaccctcaaccaatcggagaaccaccagcaggcccctctggtctgggatctggtacaatggctgcaggcggtggcgctccaatggcagacaataacgaaggcgccgacggagtgggtagttcctcaggaaattggcattgcgattccacatggctgggcgacagagtcatcaccaccagcacccgaacctgggccctgcccacctacaacaaccatctctacaagcaaatctccaacgggacatcgggaggaagcactaacgacaacacctactttggctacagcaccccctgggggtattttgacttcaacagattccactgccacttctcaccacgtgactggcagcgactcatcaacaataactggggattccggcccaagagactcaacttcaagctcttcaacatccaggtcaaggaggtcacgcagaatgaaggcaccaagaccatcgccaataaccttaccagcacgattcaggtgtttacggactcggaataccagctcccgtacgtccccggctctgcgcaccagggctgcctccctccgttcccggcggacgtcttcatgattcctcagtacgggtatctgaccctaaacaatggcagtcaggctgtgggccgttcctccttctactgcctggaatacttcccttctcaaatgctgaggacgggcaacaactttgaattcagctacaccttcgaggacgtgcctttccacagcagctacgcgcacagccagagcctggaccggctgatgaaccctctcatcgaccagtacctgtattacttatccagaactcagtccacaggaggaactcaaggtactcagcaattgttattttctcaagccgggcccgcaaacatgtcggctcaggccaagaactggctacctggaccgtgttaccgtcagcaacgagtttccacgacactgtcgcaaaacaacaacagcaattttgcttggaccggtgccaccaagtatcacctgaatggcagagactccctggttaatcccggcgttgccatggctacccacaaggacgacgaggagcgcttcttcccgtcaagcggagttctaatgtttggcaagcagggggctggaaaagacaatgtggactacagcagcgtgatgctcaccagcgaagaagaaattaaaactactaacccagtggctacagagcagtatggtgtggtggcagacaacctgcagcagaccaacggagctcccattgtgggaactgtcaacagccagggggccttacctggtatggtctggcaaaaccgggacgtgtacctgcagggccccatctgggccaaaattcctcacacggacggcaactttcatccttcgccgctgatgggaggctttggactgaaacacccgcctcctcagatcctggtgaaaaacactcctgttcctgcggatcctccgaccaccttcagccaggccaagctggcttcttttatcacgcagtacagcaccggacaggtcagcgtggaaatcgaatgggagctgcagaaagaaaacagcaagcgctggaacccagagattcagtatacttccaactactacaaatctacaaatgtggactttgctgtcaatactgagggtacttattcagagcctcgccccattggcactcgttatctcacccgtaatctgtaattgcttgttaatcaataaaccggt

SEQ ID NO: 80 - protein, 738 aa, Artificial Sequence
  source: /note="Description of Artificial Sequence: Synthetic polypeptide"
MAADGYLPDWLEDNLSEGIREWWDLKPGAPKPKANQQKQDDGRGLVLPGYKYLGPFNGLDKGEPVNAADAAALEHDKAYDQQLKAGDNPYLRYNHADAEFQERLQEDTSFGGNLGRAVFQAKKRVLEPLGLVEEGAKTAPGKKRPVEPSPQRSPDSSTGIGKKGHQPARKRLNFGQTGDSESVPDPQPIGEPPAGPSGLGSGTMAAGGGAPMADNNEGADGVGSSSGNWHCDSTWLGDRVITTSTRTWALPTYNNHLYKQISNGTSGGSTNDNTYFGYSTPWGYFDFNRFHCHFSPRDWQRLINNNWGFRPKRLNFKLFNIQVKEVTQNEGTKTIANNLTSTIQVFTDSEYQLPYVPGSAHQGCLPPFPADVFMIPQYGYLTLNNGSQAVGRSSFYCLEYFPSQMLRTGNNFEFSYTFEDVPFHSSYAHSQSLDRLMNPLIDQYLYYLSRTQSTGGTQGTQQLLFSQAGPANMSAQAKNWLPGPCYRQQRVSTTLSQNNNSNFAWTGATKYHLNGRDSLVNPGVAMATHKDDEERFFPSSGVLMFGKQGAGKDNVDYSSVMLTSEEEIKTTNPVATEQYGVVADNLQQTNGAPIVGTVNSQGALPGMVWQNRDVYLQGPIWAKIPHTDGNFHPSPLMGGFGLKHPPPQILVKNTPVPADPPTTFSQAKLASFITQYSTGQVSVEIEWELQKENSKRWNPEIQYTSNYYKSTNVDFAVNTEGTYSEPRPIGTRYLTRNL

SEQ ID NO: 81 - DNA, 3123 bp, Artificial Sequence
  source: /note="Description of Artificial Sequence: Synthetic polynucleotide"
gaattcgcccttggctgcgtcaactggaccaatgagaactttcccttcaacgattgcgtcgacaagatggtgatctggtgggaggagggcaagatgacggccaaggtcgtggagtccgccaaggccattctcggcggcagcaaggtgcgcgtggaccaaaagtgcaagtcgtccgcccagatcgaccccacccccgtgatcgtcacctccaacaccaacatgtgcgccgtgattgacgggaacagcaccaccttcgagcaccagcagccgttgcaggaccggatgttcaagttcgaactcacccgccgtctggagcacgactttggcaaggtgaccaagcaggaagtcaaagagttcttccgctgggcgcaggatcacgtgaccgaggtggcgcatgagttctacgtcagaaagggcggagccagcaaaagacccgcccccgatgacgcggatataagcgagcccaagcgggcctgcccctcagtcgcggatccatcgacgtcagacgcggaaggagctccggtggactttgccgacaggtaccaaaacaaatgttctcgtcacgcgggcatgctccagatgctgtttccctgcaaaacgtgcgagagaatgaatcagaatttcaacatttgcttcacgcacggggtcagagactgctcagaatgtttccccggtgcatcagaatctcaaccggtcgtcagaaaaaaaacgtatcagaaactgtgtgccattcatcatctgctggggcgggcacccgagattgcttgctcggcctgcgatctggtcaacgtggacctggacgactgtgtttctgagcaataaatgacttaaaccaggtatggctgccgatggttatcttccagattggcttgaggacaacctctctgagggcattcgcgagtggtgggacctgaaacctggagccccgaaacccaaagccaaccagcaaaagcaggacgacggccggggtctggtgcttcctggctacaagtacctcggacccttcaacggactcgacaagggggagcccgtcaacgcggcggacgcagcggccctcgagcacgacaaggcctacgaccagcagctcaaagcgggtgacaatccgtacctgcggtataaccacgccgacgccgagtttcaggagcgtctgcaagaagatacgtcttttgggggcaacctcgggcgagcagtcttccaggccaagaagcgggttctcgaacctctcggtctggttgaggaaggcgctaagacggctcctggaaagaagagaccggtagagccatcacctcagcgttcccccgactcctccacgggcatcggcaagaaaggccaccagcccgcgagaaagagactgaactttgggcagactggcgactcggagtcagtccccgaccctcaaccaatcggagaaccaccagcaggcccctctggtctgggatctggtacaatggctgcaggcggtggcgctccaatggcagacaataacgaaggcgccgacggagtgggtagttcctcaggaaattggcattgcgattccacatggctgggcgacagagtcatcaccaccagcacccgaacctgggccctgcccacctacaacaaccatctctacaagcaaatctccaacgggacatcgggaggaagcactaacgacaacacctactttggctacagcaccccctgggggtattttgacttcaacagattccactgccacttctcaccacgtgactggcagcgactcatcaacaataactggggattccggcccaagagactcaacttcaagctcttcaacatccaggtcaaggaggtcacgcagaatgaaggcaccaagaccatcgccaataaccttaccagcacgattcaggtgtttacggactcggaataccagctcccgtacgtcctcggctctgcgcaccagggctgcctccctccgttcccggcggacgtcttcatgattcctcagtacgggtatctgaccctaaacaatggcagtcaggctgtgggccgttcctccttctactgcctggaatacttcccttctcaaatgctgaggacgggcaacaactttgaattcagctacaccttcgaggacgtgcctttccacagcagctacgcgcacagccagagcctggaccggctgatgaaccctctcatcgaccagtacctgtattacttatccagaactcagtccacaggaggaactcaaggtactcagcaattgttattttctcaagccgggcccgcaaacatgtcggctcaggccaagaactggctacctggaccgtgttaccgtcagcaacgagtttccacgacactgtcgcaaaacaacaacagcaattttgcttggaccggtgccaccaagtatcacctgaatggcagagactccctggttaatcccggcgttgccatggctacccacaaggacgacgaggagcgcttcttcccgtcaagcggagttctaatgtttggcaagcagggggctggaaaagacaatgtggactacagcagcgtgatgctcaccagcgaagaagaaattaaaactactaacccagtggctacagagcagtatggtgtggtggcagacaacctgcagcagaccaacggagctcccattgtgggaactgtcaacagccagggggccttacctggtatggtctggcaaaaccgggacgtgtacctgcagggccccatctgggccaaaattcctcacacggacggcaactttcatccttcgccgctgatgggaggctttggactgaaacacccgcctcctcagatcctggtgaaaaacactcctgttcctgcggatcctccgaccaccttcagccaggccaagctggcttcttttatcacgcagtacagcaccggacaggtcagcgtggaaatcgaatgggagctgcagaaagaaaacagcaagcgctggaacccagagattcagtatacttccaactactacaaatctacaaatgtggactttgctgtcaatactgagggtacttattcagagcctcgccccattggcactcgttatctcacccgtaatctgtaattgcttgttaatcaataaaccggttaattcgtttcagttgaactttggtctctgcgaagggcgaattc

SEQ ID NO: 82 - protein, 738 aa, Artificial Sequence
  source: /note="Description of Artificial Sequence: Synthetic polypeptide"
MAADGYLPDWLEDNLSEGIREWWDLKPGAPKPKANQQKQDDGRGLVLPGYKYLGPFNGLDKGEPVNAADAAALEHDKAYDQQLKAGDNPYLRYNHADAEFQERLQEDTSFGGNLGRAVFQAKKRVLEPLGLVEEGAKTAPGKKRPVEPSPQRSPDSSTGIGKKGHQPARKRLNFGQTGDSESVPDPQPIGEPPAGPSGLGSGTMAAGGGAPMADNNEGADGVGSSSGNWHCDSTWLGDRVITTSTRTWALPTYNNHLYKQISNGTSGGSTNDNTYFGYSTPWGYFDFNRFHCHFSPRDWQRLINNNWGFRPKRLNFKLFNIQVKEVTQNEGTKTIANNLTSTIQVFTDSEYQLPYVLGSAHQGCLPPFPADVFMIPQYGYLTLNNGSQAVGRSSFYCLEYFPSQMLRTGNNFEFSYTFEDVPFHSSYAHSQSLDRLMNPLIDQYLYYLSRTQSTGGTQGTQQLLFSQAGPANMSAQAKNWLPGPCYRQQRVSTTLSQNNNSNFAWTGATKYHLNGRDSLVNPGVAMATHKDDEERFFPSSGVLMFGKQGAGKDNVDYSSVMLTSEEEIKTTNPVATEQYGVVADNLQQTNGAPIVGTVNSQGALPGMVWQNRDVYLQGPIWAKIPHTDGNFHPSPLMGGFGLKHPPPQILVKNTPVPADPPTTFSQAKLASFITQYSTGQVSVEIEWELQKENSKRWNPEIQYTSNYYKSTNVDFAVNTEGTYSEPRPIGTRYLTRNL

SEQ ID NO: 83 - DNA, 3122 bp, Artificial Sequence
  source: /note="Description of Artificial Sequence: Synthetic polynucleotide"
gaattcgccctttctacggctgcgtcaactggaccaatgagaactttcccttcaacgattgcgtcgacaagatggtgatctggtgggaggagggcaagatgacggccaaggtcgtggagtccgccaaggccattctcggcggcagcaaggtgcgtgtggaccaaaagtgcaagtcttccgcccagatcgatcccacccccgtgatcgtcacctccaacaccaacatgtgcgccgtgattgacgggaacagcgccaccttcgagcaccagcagccgttgcaggaccggatgttcaaatttgaactcacccgccgtctggagcatgactttggcaaggtgacgaagcaggaagtcaaagagttcttccgctgggcgcaggatcacgtgaccgaggtggcgcatgagttccacgtcagaaagggtggagccaacaagagacccgcccccgatgacgcggatataagcgagcccaagcgggcctgcccctcagtcgcggatccatcgacgtcagacgcggaaggagctccggtggactttgccgacaggtaccaaaacaaatgttctcgtcacgcgggcatgcttcagatgctgtttccctgcaagacatgcgagagaatgaatcagaatttcaacatttgcttcacgcacgggaccagagactgttcagaatgtttccccggcgtgtcagaatctcaaccggtcgtcagaaagaggacgtatcggaaactctgtgcgattcatcatctgctggggcgggctcccgagattgcttgctcggcctgcgatctggtcaacgtggacctggatgactgtgtttctgagcaataaatgacttaaaccaggtatggctgccgatggttatcttccagattggctcgaggacaacctctctgagggcattcgcgagtggtgggacttgaaacctggagccccgaaacccaaagccaaccagcaaaagcaggacgacggccggggtctggtgcttcctggctacaagtacctcggacccttcaacggactcgacaagggggagcccgtcaacgcggcggacgcagcggccctcgagcacgacaaagcctacgaccagcagctcaaagcgggtgacaatccgtacctgcggtataatcacgccgacgccgagtttcaggagcgtctgcaagaagatacgtcttttgggggcaacctcgggcgagcagtcttccaggccaagaagcgggttctcgaacctctcggtctggttgaggaaggcgctaagacggctcctggaaagaagagactggtagagcagtcgccacaagagccagactcctcctcgggcatcggcaagacaggccagcagcccgctaaaaagagactcaattttggtcagactggcgactcagagtcagtccccgacccacaacctctcggagaacctccagcagccccctcaggtctgggacctaatacaatggcttcaggcggtggcgctccaatggcagacaataacgaaggcgccgacggagtgggtaattcctcgggaaattggcattgcgattccacatggctgggggacagagtcatcaccaccagcacccgaacctgggccctgcccacctacaacaaccacctctacaagcaaatctccaacggcacctcgggaggaagcaccaacgacaacacctattttggctacagcaccccctgggggtattttgacttcaacagattccactgtcacttttcaccacgtgactggcaacgactcatcaacaacaattggggattccggcccaaaagactcaacttcaagctgttcaacatccaggtcaaggaagtcacgacgaacgaaggcaccaagaccatcgccaataatctcaccagcaccgtgcaggtctttacggactcggagtaccagttaccgtacgtgctaggatccgctcaccagggatgtctgcctccgttcccggcggacgtcttcacggttcctcagtacggctatttaactttaaacaatggaagccaagccctgggacgttcctccttctactgtctggagtatttcccatcgcagatgctgagaaccggcaacaactttcagttcagctacaccttcgaggacgtgcctttccacagcagctacgcgcacagccagagcctggacaggctgatgaatcccctcatcgaccagtacctgtactacctggtcagaacgcaaacgactggaactggagggacgcagactctggcattcagccaagcgggtcctagctcaatggccaaccaggctagaaattgggtgcccggaccttgctaccggcagcagcgcgtctccacgacaaccaaccagaacaacaacagcaactttgcctggacgggagctgccaagtttaagctgaacggccgagactctctaatgaatccgggcgtggcaatggcttcccacaaggatgacgacgaccgcttcttcccttcgagcggggtcctgatttttggcaagcaaggagccgggaacgatggagtggattacagccaagtgctgattacagatgaggaagaaatcaaggctaccaaccccgtggccacagaagaatatggagcagtggccatcaacaaccaggccgccaatacgcaggcgcagaccggactcgtgcacaaccagggggtgattcccggcatggtgtggcagaatagagacgtgtacctgcagggtcccatctgggccaaaattcctcacacggacggcaactttcacccgtctcccctgatgggcggctttggactgaagcacccgcctcctcaaattctcatcaagaacacaccggttccagcggacccgccgcttaccttcaaccaggccaagctgaactctttcatcacgcagtacagcaccggacaggtcagcgtggaaatcgagtgggagctgcagaaagaaaacagcaaacgctggaatccagagattcaatacacttccaactactacaaatctacaaatgtggactttgctgtcaacacggaaggagtttatagcgagcctcgccccattggcacccgttacctcacccgcaacctgtaattacatgttaatcaataaaccggttaattcgtttcagttgaactttggtctctgcgaagggcgaattc

SEQ ID NO: 84 - protein, 736 aa, Artificial Sequence
  source: /note="Description of Artificial Sequence: Synthetic polypeptide"
MAADGYLPDWLEDNLSEGIREWWDLKPGAPKPKANQQKQDDGRGLVLPGYKYLGPFNGLDKGEPVNAADAAALEHDKAYDQQLKAGDNPYLRYNHADAEFQERLQEDTSFGGNLGRAVFQAKKRVLEPLGLVEEGAKTAPGKKRLVEQSPQEPDSSSGIGKTGQQPAKKRLNFGQTGDSESVPDPQPLGEPPAAPSGLGPNTMASGGGAPMADNNEGADGVGNSSGNWHCDSTWLGDRVITTSTRTWALPTYNNHLYKQISNGTSGGSTNDNTYFGYSTPWGYFDFNRFHCHFSPRDWQRLINNNWGFRPKRLNFKLFNIQVKEVTTNEGTKTIANNLTSTVQVFTDSEYQLPYVLGSAHQGCLPPFPADVFTVPQYGYLTLNNGSQALGRSSFYCLEYFPSQMLRTGNNFQFSYTFEDVPFHSSYAHSQSLDRLMNPLIDQYLYYLVRTQTTGTGGTQTLAFSQAGPSSMANQARNWVPGPCYRQQRVSTTTNQNNNSNFAWTGAAKFKLNGRDSLMNPGVAMASHKDDDDRFFPSSGVLIFGKQGAGNDGVDYSQVLITDEEEIKATNPVATEEYGAVAINNQAANTQAQTGLVHNQGVIPGMVWQNRDVYLQGPIWAKIPHTDGNFHPSPLMGGFGLKHPPPQILIKNTPVPADPPLTFNQAKLNSFITQYSTGQVSVEIEWELQKENSKRWNPEIQYTSNYYKSTNVDFAVNTEGVYSEPRPIGTRYLTRNL

SEQ ID NO: 85 - DNA, 3117 bp, Artificial Sequence
  source: /note="Description of Artificial Sequence: Synthetic polynucleotide"
gaattcgcccttggctgcgtcaactggaccaatgagaactttcccttcaacgattgcgtcgacaagatggtgatctggtgggaggagggcaagatgacggccaaggtcgtggagtccgccaaggccattctcggcggcagcaaggtgcgtgtggaccaaaagtgcaagtcttccgcccagatcgatcccacccccgtgatcgtcacctccaacaccaacatgtgcgccgtgattgacgggaacagcaccaccttcgagcaccagcagccgttgcaggaccggatgttcaaatttgaactcacccgccgtctggagcatgactttggcaaggtgacgaagcaggaagtcaaagagttcttccgctgggcgcaggatcacgtgaccgaggtggcgcatgagttccacgtcagaaagggtggagccaacaagagacccgcccccgatgacgcggatataagcgagcccaagcgggcctgcccctcagtcgcggatccatcgacgtcagacgcggaaggagctccggtggactttgccgacaggtaccaaaacaaatgttctcgtcacgcgggcatgcttcagatgctgtttccctgcaagacatgcgagagaatgaatcagaatttcaacatttgcttcacgcacgggaccagagactgttcagaatgtttccccggcgtgtcagaatctcaaccggtcgtcagaaagaggacgtatcggaaactctgtgcgattcatcatctgctggggcgggctcccgagattgcttgctcggcctgcgatctggtcaacgtggacctggatgactgtgtttctgagcaataaatgacttaaaccaggtatggctgccgatggttatcttccagattggctcgaggacaacctctctgagggcattcgcgagtggtgggacttgaaacctggagccccgaaacccaaagccaaccagcaaaagcaggacgacggccggggtctggtgcttcctggctacaagtacctcggacccttcaacggactcgacaagggggagcccgtcaacgcggcggacgcagcggccctcgagcacgacaaagcctacgaccagcagctcaaagcgggtgacaatccgtacctgcggtataatcacgccgacgccgagtttcaggagcgtctgcaagaagatacgtcttttgggggcaacctcgggcgagcagtcttccaggccaagaagcgggttctcgaacctctcggtctggttgaggaaggcgctaagacggctcctggaaagaagagaccggtagagcagtcgccacaagagccagactcctcctcgggcatcggcaagacaggccagcagcccgctaaaaagagactcaattttggtcagactggcgactcagagtcagtccccgacccacaacctctcggagaacctccagcagccccctcaggtctgggacctaatacaatggcttcaggcggtggcgctccaatggcagacaataacgaaggcgccgacggagtgggtaattcctcgggaaattggcattgcgattccacatggctgggggacagagtcatcaccaccagcacccgaacctgggccctgcccacctacaacaaccacctctacaagcaaatctccaacggcacctcgggaggaagcaccaacgacaacacctattttggctacagcaccccctgggggtattttgacttcaacagattccactgtcacttttcaccacgtgactggcaacgactcatcaacaacaattggggattccggcccaaaagactcaacttcaagctgttcaacatccaggtcaaggaagtcacgacgaacgaaggcaccaagaccatcgccaataatctcaccagcaccgtgcgggtctttacggactcggagtaccagttaccgtacgtgctaggatccgctcaccagggatgtctgcctccgttcccggcggacgtcttcatggttcctcagtacggctatttaactttaaacaatggaagccaagccctgggacgttcctccttctactgtctggagtatttcccatcgcagatgctgagaaccggcaacaactttcagttcagctacaccttcgaggacgtgcctttccacagcagctacgcgcacagccagagcctggacaggctgatgaatcccctcatcgaccagtacctgtactacctggtcagaacgcaaacgactggaactggagggacgcagactctggcattcagccaagcgggtcctagctcaatggccaaccaggctagaaattgggtgcccggaccttgctaccggcagcagcgcgtctccacgacaaccaaccagagcaacaacagcaactttgcctggacgggagctgccaagtttaagctgaacggccgagactctctaatgaatccgggcgtggcaatggcttcccacaaggatgacgacgaccgcttcttcccttcgagcggggtcctgatttttggcaagcaaggagccgggaacgatggagtggattacagccaagtgctgattacagatgaggaagaaatcaaggctaccaaccccgtggccacagaagaatatggagcagtggccatcaacaaccaggccgccaatacgcaggcgcagaccggactcgtgcacaaccagggggtgattcccggcatggtgtggcagaatagagacgtgtacctgcagggtcccatctgggccaaaattcctcacacggacggcaactttcacccgtctcccctgatgggcggctttggactgaagcacccgcctcctcaaattctcatcaagaacacaccggttccagcggacccgccgcttaccttcaaccaggccaagctgaactctttcatcacgcagtacagcaccggacaggtcagcgtggaaatcgagtgggagctgcagaaagaaaacagcaaacgctggaatccagagattcaatacacttccaactactacaaatctacaaatgtggactttgctgtcaacacggaaggagtttatagcgagcctcgccccattggcacccgttacctcacccgcaacctgtaattacatgttaatcaataaaccggttaattcgtttcagttgaactttggtctctgcgaagggcgaattc

SEQ ID NO: 86 - protein, 736 aa, Artificial Sequence
  source: /note="Description of Artificial Sequence: Synthetic polypeptide"
MAADGYLPDWLEDNLSEGIREWWDLKPGAPKPKANQQKQDDGRGLVLPGYKYLGPFNGLDKGEPVNAADAAALEHDKAYDQQLKAGDNPYLRYNHADAEFQERLQEDTSFGGNLGRAVFQAKKRVLEPLGLVEEGAKTAPGKKRPVEQSPQEPDSSSGIGKTGQQPAKKRLNFGQTGDSESVPDPQPLGEPPAAPSGLGPNTMASGGGAPMADNNEGADGVGNSSGNWHCDSTWLGDRVITTSTRTWALPTYNNHLYKQISNGTSGGSTNDNTYFGYSTPWGYFDFNRFHCHFSPRDWQRLINNNWGFRPKRLNFKLFNIQVKEVTTNEGTKTIANNLTSTVRVFTDSEYQLPYVLGSAHQGCLPPFPADVFMVPQYGYLTLNNGSQALGRSSFYCLEYFPSQMLRTGNNFQFSYTFEDVPFHSSYAHSQSLDRLMNPLIDQYLYYLVRTQTTGTGGTQTLAFSQAGPSSMANQARNWVPGPCYRQQRVSTTTNQSNNSNFAWTGAAKFKLNGRDSLMNPGVAMASHKDDDDRFFPSSGVLIFGKQGAGNDGVDYSQVLITDEEEIKATNPVATEEYGAVAINNQAANTQAQTGLVHNQGVIPGMVWQNRDVYLQGPIWAKIPHTDGNFHPSPLMGGFGLKHPPPQILIKNTPVPADPPLTFNQAKLNSFITQYSTGQVSVEIEWELQKENSKRWNPEIQYTSNYYKSTNVDFAVNTEGVYSEPRPIGTRYLTRNL

SEQ ID NO: 87 - DNA, 3121 bp, Artificial Sequence
  source: /note="Description of Artificial Sequence: Synthetic polynucleotide"
gaattcgcccttctacggctgcgtcaactggaccaatgagaactttcccttcaacgattgcgtcgacaagatggtgatctggtgggaggagggcaagatgacggccaaggtcgtggagtccgccaaggccattctcggcggcagcaaggtgcgtgtggaccaaaagtgcaagtcttccgcccagatcgatcccacccccgtgatcgtcacctccaacaccaacatgtgcgccgtgattgacgggaacagcaccaccttcgagcaccagcagccgttgcaggaccggatgttcaaatttgaactcacccgccgtctggagcatgactttggcaaggtgacgaagcaggaagtcaaagagttcttccgctgggcgcaggatcacgtgaccgaggtggcgcatgagttccacgtcagaaagggtggcgccaacaagagacccgcccccgatgacgcggatataagcgagcccaagcgggcctgcccctcagtcgcggatccatcgacgtcagacgcggaaggagctccggtggactttgccgacaggtaccaaaacaaatgttctcgtcacgcgggcatgcttcagatgctgtttccctgcaagacatgcgagagaatgaatcagaatttcaacatttgcttcacgcacgggaccagagactgttcagaatgtttccccggcgtgtcagaatctcaaccggtcgtcagaaagaggacgtatcggaaactctgtgcgattcatcatctgctggggcgggctcccgagattgcttgctcggcctgcgatctggtcaacgtggacctggatgactgtgtttctgagcaataaatgacttaaaccaggtatggctgccgatggttatcttccagattggctcgaggacaacctctctgagggcattcgcgagtggtgggacttgaaacctggagccccgaaacccaaagccaaccagcaaaagcaggacgacggccggggtctggtgcttcctggctacaagtacctcggacccttcaacggactcgacaagggggagcccgtcaacgcggcggacgcagcggccctcgagcacgacaaagcctacgaccagcagctcaaagcgggtgacaatccgtacctgcggtataatcacgccgacgccgagtttcaggagcgtctgcaagaagatacgtcctttgggggcaacctcgggcgagcagtcttccaggccaagaagcgggttctcgaacctctcggtctggttgaggaaggcgctaagacggctcctggaaagaagagaccggtagagcagtcgccacaagagccagactcctcctcgggcatcggcaagacaggccagcagcccgctaaaaagagactcaattttggtcagactggcgactcagagtcagtccccgacccacaacctctcggagaacctccagcagccccctcaggtctgggacctaatacaatggcttcaggcggtggcgctccaatggcagacaataacgaaggcgccgacggagtgggtaattcctcgggaaattggcattgcgattccacatggctgggggacagagtcatcaccaccagcacccgaacctgggccctgcccacctacaacaaccacctctacaagcaaatctccaacggcacctcgggaggaagcaccaacgacaacacctattttggctacagcaccccctgggggtattttgacttcaacagattccactgtcacttttcaccacgtgactggcaacgactcatcaacaacaattggggattccggcccaaaagactcaacttcaagctgttcaacatccaggtcaaggaagtcacgacgaacgaaggcaccaagaccatcgccaataatctcaccagcaccgtgcaggtctttacggacttggagtaccagttaccgtacgtgctaggatccgctcaccagggatgtctgcctccgttcccggcggacgtcttcatggttcctcagtacggctatttaactttaaacaatggaagccaagccctgggacgttcctccttctactgtctggagtatttcccatcgcagatgccgagaaccggcaacaactttcagttcagctacaccttcgaggacgtgcctttccacagcagctacgcgcacagccagagcctggacaggctgatgaatcccctcatcgaccagtacctgtactacctggtcagaacgcaaacgactggaactggagggacgcagactctggcattcagccaagcgggtcctagctcaatggccaaccaggctagaaattgggtgcccggaccttgctaccggcagcagcgcgtctccacgacaaccaaccagaacaacaacagcaactttgcctggacgggagctgccaagtttaagctgaacggccgagactctctaatgaatccgggcgtggcaatggcttcccacaaggatgacgacgaccgcttcttcccttcgagcggggtcctgatttttggcaagcaaggagccgggaacgatggagtggattacagccaagtgctgattacagatgaggaagaaatcaaggctaccaaccccgtggccacagaagaatatggagcagtggccatcaacaaccaggccgccaatacgcaggcgcagaccggactcgtgcacaaccagggggtgattcccggcatggtgtggcagaatagagacgtgtacctgcagggtcccatctgggccaaaattcctcacacggacggcaactttcacccgtctcccctgatgggcggctttggactgaagcacccgcctcctcaaattctcatcaagaacacaccggttccagcggacccgccgcttaccttcaaccaggccaagctgaactctttcatcacgcagtacagcaccggacaggtcagcgtggaaatcgagtgggagctgcagaaagaaaacagcaaacgctggaatccagagattcaatacacttccaactactacaaatctacaaatgtggactttgctgtcaacacggaaggagtttatagcgagcctcgccccattggcacccgttacctcacccgcaacctgtaattacatgttaatcaataaaccggttaattcgtttcagttgaactttggtctctgcgaagggcgaattc

SEQ ID NO: 88 - protein, 736 aa, Artificial Sequence
  source: /note="Description of Artificial Sequence: Synthetic polypeptide"
MAADGYLPDWLEDNLSEGIREWWDLKPGAPKPKANQQKQDDGRGLVLPGYKYLGPFNGLDKGEPVNAADAAALEHDKAYDQQLKAGDNPYLRYNHADAEFQERLQEDTSFGGNLGRAVFQAKKRVLEPLGLVEEGAKTAPGKKRPVEQSPQEPDSSSGIGKTGQQPAKKRLNFGQTGDSESVPDPQPLGEPPAAPSGLGPNTMASGGGAPMADNNEGADGVGNSSGNWHCDSTWLGDRVITTSTRTWALPTYNNHLYKQISNGTSGGSTNDNTYFGYSTPWGYFDFNRFHCHFSPRDWQRLINNNWGFRPKRLNFKLFNIQVKEVTTNEGTKTIANNLTSTVQVFTDLEYQLPYVLGSAHQGCLPPFPADVFMVPQYGYLTLNNGSQALGRSSFYCLEYFPSQMPRTGNNFQFSYTFEDVPFHSSYAHSQSLDRLMNPLIDQYLYYLVRTQTTGTGGTQTLAFSQAGPSSMANQARNWVPGPCYRQQRVSTTTNQNNNSNFAWTGAAKFKLNGRDSLMNPGVAMASHKDDDDRFFPSSGVLIFGKQGAGNDGVDYSQVLITDEEEIKATNPVATEEYGAVAINNQAANTQAQTGLVHNQGVIPGMVWQNRDVYLQGPIWAKIPHTDGNFHPSPLMGGFGLKHPPPQILIKNTPVPADPPLTFNQAKLNSFITQYSTGQVSVEIEWELQKENSKRWNPEIQYTSNYYKSTNVDFAVNTEGVYSEPRPIGTRYLTRNL

SEQ ID NO: 89 - DNA, 3122 bp, Artificial Sequence
  source: /note="Description of Artificial Sequence: Synthetic polynucleotide"
gaattcgccctttctacggctgcgtcaactggaccaatgagaactttcccttcaacgattgcgtcgacaagatggtgatctggtgggaggagggcaagatgacggccaaggtcgtggagtccgccaaggccattctcggcggcagcaaggtgcgtgtggaccaaaagtgcaagtcttccgcccagatcgatcccacccccgtgatcgtcacctccaacaccaacatgtgcgccgtgattgacgggaacagcaccaccttcgagcaccagcagccgttgcaggaccggatgttcaaatttgaactcacccgccgtctggagcatgactttggcaaggtgacgaagcaggaagtcaaagggttcttccgctgggcgcaggatcacgtgaccgaggtggcgcatgagttccacgtgcgagcccaagcgggcctgcccctcagtcgcggatccatcgacgtcagaccagaaagggtggagccaacaagagacccgcccccgatgacgcggatataagcggaaggagctccggtggactttgccgacaggtaccaaaacaaatgttctcgtcacgcgggcatgcttcagatgctgtttccctgcaagacatgcgagagaatgaatcagaatttcaacatttgcttcacgcacgggaccagagactgttcagaatgtttccccggcgtgtcagaatctcaaccggtcgtcagaaagaggacgtatcggaaactctgtgcgattcatcatctgctggggcgggctcccgagattgcttgctcggcctgcgatctggtcaacgtggacctggatgactgtgtttctgagcaataaatgacttaaaccaggtatggctgccgatggttatcttccagattggctcgaggacaacctctctgagggcattcgcgagtggtgggacttgaaacctggagccccgaaacccaaagccaaccagcaaaagcaggacgacggccggggtctggtgcttcctggctacaagtacctcggacccttcaacggactcgacaagggggagcccgtcaacgcggcggacgcagcggccctcgagcacgacaaagcctacgaccagcagctcaaagcgggtgacaatccgtacctgcggtataatcacgccgacgccgagtttcaggagcgtctgcaagaagatacgtcttttgggggcaacctcgggcgagcagtcttccaggccaagaagcgggttctcgaacctctcggtctggttgaggaaggcgctaagacggctcctggaaagaagagaccggtagagcagtcgccacaagagccagactcctcctcgggcatcggcaagacaggccagcagcccgctaaaaagagactcaattttggtcagactggcgactcagagtcagtccccgacccacaacctctcggagaacctccagcagccccctcaggtctgggacctaatacaatggcttcaggcggtggcgctccaatggcagacaataacgaaggcgccgacggagtgggtaattcctcgggaaattggcattgcgattccacatggctgggggacagagtcatcaccaccagcacccgaacctgggccctgcccacctacaacaaccacctctacaagcaaatctccaacggcacctcgggaggaagcaccaacgacaacacctattttggctacagcaccccctgggggtattttgacttcaacagattccactgtcacttttcaccacgtgactggcaacgactcatcaacaacaattggggattccggcccaaaagactcaacttcaagctgttcaacatccaggtcaaggaagtcacgacgaacgaaggcaccaagaccatcgccaataatctcaccagcaccgtgcaggtctttacggactcggagtaccagttaccgtacgtgctaggatccgctcaccagggatgtctgcctccgttcccggcggacgtcttcatggttcctcagtacggctatttaactttaaacaatggaagccaagccctgggacgttcctccttctactgtctggagtatttcccatcgcagatgctgagaaccggcaacaactttcagttcagctacaccttcgaggacgtgcctttccacagcagctacgcgcacagccagagcctggacaggctgatgaatcccctcatcgaccagtacctgtactacctggtcagaacgcaaacgactggaactggagggacgcagactctggcattcagccaagcgggtcctagctcaatggccaaccaggctagaaattgggtgcccggaccttgctaccggcagcagcgcgtctccacgacaaccaaccagaacaacaacagcaactttgcctggacgggagctgccaagtttaagctgaacggccgagactctctaatgaatccgggcgtggcaatggcttcccacaaggatgacgacgaccgcttcttcccttcgagcggggtcctgatttttggcaagcaaggagccgggaacgatggagtggattacagccaagtgctgattacagatgaggaagaaatcaaggctaccaaccccgtggccacagaagaatatggagcagtggccatcaacaaccaggccgccaatacgcaggcgcagaccggactcgtgcacaaccagggggtgattcccggcatggtgtggcagaatagagacgtgtacctgcagggtcccatctgggccaaaattcctcacacggacggcaactttcacccgtctcccctgatgggcggctttggactgaagcacccgcctcctcaaattctcatcaagaacacaccggttccagcggacccgccgcttaccttcaaccaggccaagctgaactctttcatcacgcagtacagcaccggacaggtcagcgtggaaatcgagtgggagctgcagaaagaaaacagcaaacgctggaatccagagattcaatacacttccaactactacaaatctacaaatgtggactttgctgtcaacacggagggggtttatagcgagcctcgccccattggcacccgttacctcacccgcaacctgtaattacatgttaatcaataaaccggttaattcgtttcagttgaactttggtctctgcgaagggcgaattc

SEQ ID NO: 90 - protein, 736 aa, Artificial Sequence
  source: /note="Description of Artificial Sequence: Synthetic polypeptide"
MAADGYLPDWLEDNLSEGIREWWDLKPGAPKPKANQQKQDDGRGLVLPGYKYLGPFNGLDKGEPVNAADAAALEHDKAYDQQLKAGDNPYLRYNHADAEFQERLQEDTSFGGNLGRAVFQAKKRVLEPLGLVEEGAKTAPGKKRPVEQSPQEPDSSSGIGKTGQQPAKKRLNFGQTGDSESVPDPQPLGEPPAAPSGLGPNTMASGGGAPMADNNEGADGVGNSSGNWHCDSTWLGDRVITTSTRTWALPTYNNHLYKQISNGTSGGSTNDNTYFGYSTPWGYFDFNRFHCHFSPRDWQRLINNNWGFRPKRLNFKLFNIQVKEVTTNEGTKTIANNLTSTVQVFTDSEYQLPYVLGSAHQGCLPPFPADVFMVPQYGYLTLNNGSQALGRSSFYCLEYFPSQMLRTGNNFQFSYTFEDVPFHSSYAHSQSLDRLMNPLIDQYLYYLVRTQTTGTGGTQTLAFSQAGPSSMANQARNWVPGPCYRQQRVSTTTNQNNNSNFAWTGAAKFKLNGRDSLMNPGVAMASHKDDDDRFFPSSGVLIFGKQGAGNDGVDYSQVLITDEEEIKATNPVATEEYGAVAINNQAANTQAQTGLVHNQGVIPGMVWQNRDVYLQGPIWAKIPHTDGNFHPSPLMGGFGLKHPPPQILIKNTPVPADPPLTFNQAKLNSFITQYSTGQVSVEIEWELQKENSKRWNPEIQYTSNYYKSTNVDFAVNTEGVYSEPRPIGTRYLTRNL

SEQ ID NO: 91 - DNA, 2370 bp, Artificial Sequence
  source: /note="Description of Artificial Sequence: Synthetic polynucleotide"
gaattcgccctttctacggctgcgtcaactggaccaatgagaactttcccttcaacgattgcgtcgacaagatggtgatctggtgggaggagggcaagatgacggccaaggtcgtggagtccgccaaggccattctcggcggcagcaaggtgcgcgtggaccaaaagtgcaagtcgtccgcccagatcgaccccacccccgtgatcgtcacctccaacaccaacatgtgcgccgtgattgacgggaacagcaccaccttcgagcaccagcagccgttgcaggaccggatgttcaagttcgaactcacccgccgtctggagcacgactttggcaaggtgaccaagcaggaagtcaaagagttcttccgctgggcgcaggatcacgtgaccgaggtggcgcatgagttctacgtcagaaagggcggagccagcaaaagacccgcccccgatgacgcggatataagcgagcccaagcgggcctgcccctcagtcgcggatccatcgacgtcagacgcggaaggagctccggtggactttgccgacaggtaccaaaacaaatgttctcgtcacgcgggcatgcttcagacgctgtttccctgcaaaacgtgcgagagaatgaatcagaatttcaacatttgcttcacgcacggggtcagagactgctcagaatgtttccccggtgcatcagaatctcaaccggtcgtcagaaaaaaaacgtatcagaaactgtgtgccattcatcatctgctggggcgggcacccgagattgcttgctcggcctgcgatctggtcaacgtggacctggacgactgtgtttctgagcaataaatgacttaaaccaggtatggctgccgatggttatcttccagattggcttgaggacaacctctctgagggcattcgcgagtggtgggacctgaaacctggagccccgaaacccaaagccaaccagcaaaagcaggacgacggccggggtctggtgcttcctggctacaagtacctcggacccttcaacggactcgacaagggggagcccgtcaacgcggcggacgcagcggccctcgagcacgacaaggcctacgaccagcagctcaaagcgggtgacaatccgtacctgcggtataaccacgccgacgccgagtttcaggagcgtctgcaagaagatacgtcttttgggggcaacctcgggcgagcagtcttccaggccaagaagcgggttctcgaacctctcggtctggttgaggaaggcgctaagacggctcctggaaagaagagaccggtagagccatcacctcagcgttcccccgactcctccacgggcatcggcaagaaaggccaccagcccgcgagaaagagactgaactttgggcagactggcgactcggagtcagtccccgaccctcaaccaatcggagaaccaccagcaggcccctctggtctgggatctggtacaatggctgcaggcggtggcgctccaatggcagacaataacgaaggcgccgacggagtgggtagttcctcaggaaattggcattgcgattccacatggctgggcgacagagtcatcaccaccagcacccgaacctgggccctgcccacctacaacaaccatctctacaagcaaatctccaacgggacatcgggaggaagcactaacgacaacacctactttggctacagcaccccctgggggtattttgacttcaacagattccactgccacttctcaccacgtgactggcagcgactcatcaacaataactggggattccggcccaagagactcaacttcaagctcttcaacatccaggtcaaggaggtcacgcagaatgaaggcaccaagaccatcgccaataaccttaccagcacgattcaggtgtttacggactcggaataccagctcccgtacgtcctcggctctgcgcaccagggctgcctccctccgttcccggcggacgtcttcatgattcctcagtacgggtatctgaccctaaacaatggcagtcaggctgtgggccgttcctccttctactgcctggaatacttcccttctcaaatgctgaggacgggcaacaactttgaattcagctacaccttcgaggacgtgcctttccacagcagctacgcgcacagccagagcctggaccggctgatgaaccctctcatcgaccagtacctgtattacttatccagaactcagtccacaggaggaactcaaggtactcagcaattgttattttctcaagccgggcccgcaaacatgtyggctcaggccaagaactggctacctggaccgtgttaccgtcagcaacgagtttccacgacactgtcgcaaaacaacaacagcaattttgctggaccggtgccacca

SEQ ID NO: 92 - protein, 738 aa, Artificial Sequence; identical to SEQ ID NO: 82
  source: /note="Description of Artificial Sequence: Synthetic polypeptide"

SEQ ID NO: 93 - DNA, 2205 bp, Artificial Sequence
  source: /note="Description of Artificial Sequence: Synthetic polynucleotide"
atgactgacggttaccttccagattggctagaggacaacctctctgaaggcgttcgagagtggtgggcgctgcaacctggagcccctaaacccaaggcaaatcaacaacatcaggacaacgctcggggtcttgtgcttccgggttacaaatacctcggacccggcaacggactcgacaagggggaacccgtcaacgcagcggacgcggcagccctcgagcacgacaaggcctacgaccagcagctcaaggccggtgacaacccctacctcaagtacaaccacgccgacgcggagttccagcagcggcttcagggcgacacatcgtttgggggcaacctcggcagagcagtcttccaggccaaaaagagggttcttgaacctcttggtctggttgagcaagcgggtgagacggctcctggaaagaagagaccgttgattgaatccccccagcagcccgactcctccacgggtatcggcaaaaaaggcaagcagccggctaaaaagaagctcgttttcgaagacgaaactggagcaggcgacggaccccctgagggatcaacttccggagccatgtctgatgacagtgagatgcgtgcagcagctggcggagctgcagtcgagggcggacaaggtgccgatggagtgggtaatgcctcgggtgattggcattgcgattccacctggtctgagggccacgtcacgaccaccagcaccagaacctgggtcttgcccacctacaacaaccacctctacaagcgactcggagagagcctgcagtccaacacctacaacggattctccaccccctggggatactttgacttcaaccgcttccactgccacttctcaccacgtgactggcagcgactcatcaacaacaactggggcatgcgacccaaagccatgcgggtcaaaatcttcaacatccaggtcaaggaggtcacgacgtcgaacggcgagacaacggtggctaataaccttaccagcacggttcagatctttgcggactcgtcgtacgaactgccgtacgtgatggatgcgggtcaagagggcagcctgcctccttttcccaacgacgtctttatggtgccccagtacggctactgtggactggtgaccggcaacacttcgcagcaacagactgacagaaatgccttctactgcctggagtactttccttcgcagatgctgcggactggcaacaactttgaaattacgtacagttttgagaaggtgcctttccactcgatgtacgcgcacagccagagcctggaccggctgatgaaccctctcatcgaccagtacctgtggggactgcaatcgaccaccaccggaaccaccctgaatgccgggactgccaccaccaactttaccaagctgcggcctaccaacttttccaactttaaaaagaactggctgcccgggccttcaatcaagcagcagggcttctcaaagactgccaatcaaaactacaagatccctgccaccgggtcagacagtctcatcaaatacgagacgcacagcactctggacggaagatggagtgccctgacccccggacctccaatggccacggctggacctgcggacagcaagttcagcaacagccagctcatctttgcggggcctaaacagaacggcaacacggccaccgtacccgggactctgatcttcacctctgaggaggagctggcagccaccaacgccaccgatacggacatgtggggcaacctacctggcggtgaccagagcaacagcaacctgccgaccgtggacagactgacagccttgggagccgtgcctggaatggtctggcaaaacagagacatttactaccagggtcccatttgggccaagattcctcataccgatggacactttcacccctcaccgctgattggtgggtttgggctgaaacacccgcctcctcaaatttttatcaagaacaccccggtacctgcgaatcctgcaacgaccttcagctctactccggtaaactccttcattactcagtacagcactggccaggtgtcggtgcagattgactgggagatccagaaggagcggtccaaacgctggaaccccgaggtccagtttacctccaactacggacagcaaaactctctgttgtgggctcccgatgcggctgggaaatacactgagcctagggctatcggtacccgctacctcacccaccacctgtaa

SEQ ID NO: 94 - protein, 734 aa, Artificial Sequence; identical to SEQ ID NO: 66
  source: /note="Description of Artificial Sequence: Synthetic polypeptide"

SEQ ID NO: 95 - DNA, 3128 bp, Artificial Sequence
  source: /note="Description of Artificial Sequence: Synthetic polynucleotide"
gaattcgccctttctacggctgcgtcaactggaccaatgagaactttcccttcaacgattgcgtcgacaagatgttgatctggtgggaggagggcaagatgacggccaaggtcgtggagtccgccaaggccattctcggcggcagcaaagtgcgcgtggaccaaaagtgcaagccgtccgcccagatcgaccccacccccgtgatcgtcacctccaacaccaacatgtgcgccgtgattgacgggaacagcaccaccttcgagcaccagcagccgttgcgggaccggatgttcaagtttgaactcacccgccgtctggagcacgactttggcaaggtgacaaagcaggaagtcagagagttcttccgctgggcgcaggatcacgtgaccgaggtggcgcacgagttctacgtcagaaagggtggagccaacaagagacccgcccccgatgacgcggataaaagcgagcccaagcgggcctgcccctcagtcgcggatccatcgacgtcagacgcggaaggagctccggtggactttgccgacaggtaccaaaacaaatgttctcgtcacgcgggcatgcttcagatgctgtttccctgcaaaacatgcgagagaatgaatcagaatttcaacatttgcttcacgcacgggaccagagactgttcagaatgtttccccggcgtgtcagaatctcaaccggtcgtcagaaaaaagacgtatcggaaactctgtgcgattcatcatctgctggggcgggcacccgagattgcttgctcggcctgcgatctggtcaacgtggacctagatgactgtgtttctgagcaataaatgacttaaaccaggtatggctgccgatggttatcttccagattggctcgaggacaacctctctgagggcattcgcgagtggtgggacttgaaacctggagccccgaaacccaaagccaaccagcaaaagcaggacgacggccggggtctggtgcttcctggctacaagtacctcggacccttcaacggactcgacaagggggagcccgtcaacgcggcggacgcagcggccctcgagcacgacaaggcctacgaccagcagctcaaagcgggtgacaatccgtacctgcggtataaccacgccgacgccgagtttcaggagcgtctgcaagaagatacgtcttttgggggcaacctcgggcgagcagtcttccaggccaagaagcgggttctcgaacctctcggtctggttgaggaaggcgctaagacggctcctggaaagaagagaccggtagagccatcaccccagcgttctccagactcctctacgggcatcggcaagaaaggccagcagcccgcgaaaaagagactcaactttgggcagactggcgactcagagtcagtgcccgaccctcaaccaatcggagaaccccccgcaggcccctctggtctgggatctggtacaatggctgcaggcggtggcgctccaatggcagacaataacgaaggcgccgacggagtgggtagttcctcaggaaattggcattgcgattccacatggctgggcgacagagtcatcaccaccagcacccgaacctgggccctccccacctacaacaaccacctctacaagcaaatctccaacgggacttcgggaggaagcaccaacgacaacacctacttcggctacagcaccccctgggggtattttgactttaacagattccactgccacttctcaccacgtgactggcagcgactcatcaacaacaactggggattccggcccaagagactcaacttcaagctcttcaacatccaggtcaaggaggtcacgcagaatgaaggcaccaagaccatcgccaataaccttaccagcacgattcaggtctttacggactcggaataccagctcccgtacgtcctcggctctgcgcaccagggctgcctgcctccgttcccggcggacgtcttcatgattcctcagtacgggtacctgactctgaacaatggcagtcaggccgtgggccgttcctccttctactgcctggagtactttccttctcaaatgctgagaacgggcaacaactttgagttcagctaccagtttgaggacgtgccttttcacagcagctacgcgcacagccaaagcctggaccggctgatgaaccccctcatcgaccagtacctgtactacctgtctcggactcagtccacgggaggtaccgcaggaactcagcagttgctattttctcaggccgggcctaataacatgtcggctcaggccaaaaactggctacccgggccctgctaccggcagcaacgcgtctccacgacactgtcgcaaaataacaacagcaactgtaaatcccggtgtcgctatggcaacccacaaggacgacgaagagcgattttgcctggaccggtgccaccaagtatcatctgaatggcagagactctctgttttccgtccagcggagtcttaatgtttgggaaacagggagctggaaaagacaacgtggactatagcagcgttatgctaaccagtgaggaagaaattaaaaccaccaacccagtggccacggaacagtacggcgtggtggccgataacctgcaacagcaaaacgccgctcctattgtaggggccgtcaacagtcaaggagccttacctggcatggtctggcagaaccgggacgtgtacctgcagggtcctatctgggccaagattcctcacacggacggaaactttcatccctcgccgctgatgggaggctttggactgaaacacccgcctcctcagatcctgattaagaatacacctgttcccgcggatcctccaactaccttcagtcaagctaagctggcgtcgttcatcacgcagtacagcaccggacaggtcagcgtggaaattgaatgggagctgcagaaagaaaacagcaaacgctggaacccagagattcaatacacttccaactactacaaatctacaaatgtggacttcgctgttaacacagatggcacttattctgagcctcgccccattggcacccgttacctcacccgtaatctgtaattgctcgttaatcaataaaccggttgattcgtttcagttgaactttggtctctgcgaagggcgaattc

SEQ ID NO: 96 - protein, 738 aa, Artificial Sequence; identical to SEQ ID NO: 16
  source: /note="Description of Artificial Sequence: Synthetic polypeptide"

SEQ ID NO: 97 - DNA, 3128 bp, Artificial Sequence
  source: /note="Description of Artificial Sequence: Synthetic polynucleotide"
gaattcgccctttctacggctgcgtcaactggaccaatgagaactttcccttcaacgattgcgtcgacaagatggtgatctggtgggaggagggcaagatgacggccaaggtcgtggagtccgccaaggccattctcggcggcagcaaagtgcgcgtggaccaaaagtgcaagtcgtccgcccagatcgaccccacccccgtgatcgtcacctccaacaccaacatgtgcgccgtgattgacgggaacagcaccaccttcgagcaccagcagccgttgcaggaccggatgttcaagtttgaactcacccgccgtctggagcacgactttggcaaggtgacaaagcaggaagtcagagagttcttccgctgggcgcaggatcacgtgaccgaggtggcgcacgagttctacgtcagaaagggtggagccaacaagagacccgcccccgatgacgcggataaaagcgagcccaagcgggcctgcccctcagtcgcggatccatcgacgtcagacgcggaaggagctccggtggactttgccgacaggtaccaaaacaaatgttctcgtcacgcgggcatgcttcagatgctgtttccctgcaaaacatgcgagagaatgaatcagaatttcaacatttgcttcacgcacgggaccagagactgttcagaatgtttccccggcgtgtcagaatctcaaccggttgtcagaaaaaagacgtatcggaaactctgtgcgattcatcatctgctggggcgggcacccgagattgcttgctcggcctgcgatctggtcaacgtggacctagatgactgtgtttctgagcaataaatgacttaaaccaggtatggctgccgatggttatcttccagattggctcgaggacaacctctctgagggcattcgcgagtggtgggacttgaaacctggagccccgaaacccaaagccaaccagcaaaagcaggacgacggccggggtctggtgcttcctggctacaagtacctcggacccttcaacggactcgacaagggggagcccgtcaacgcggcggacgcagcggccctcgagcacgacaaggcctacgaccagcagctcaaagcgggtgacaatccgtacctgcggtataaccacgccgacgccgagtttcaggagcgtctgcaagaagatacgtcttttgggggcaacctcgggcgagcagtcttccaggccaagaagcgggttctcgaacctctcggtctggttgaggaaggcgctaagacggctcctggaaagaagagaccggtagagccatcaccccagcgttctccagactcctctacgggcatcggcaagaaaggccagcagcccgcgaaaaagagactcaactttgggcagactggcgactcagagtcagtgcccgaccctcaaccaatcggagaaccccccgcaggcccctctggtctgggatctggtacaatggctgcaggcggtggcgctccaatggcagacaataacgaaggcgccgacggagtgggtagttcctcaggaaattggcattgcgattccacatggctgggcgacagagtcatcaccaccagcacccgaacctgggccctccccacctacaacaaccacctctacaagcaaatctccaacgggacttcgggaggaagcaccaacgacaacacctacttcggctacagcaccccctgggggtattttgactttaacagattccactgccacttctcaccacgtgactggcagcgactcatcaacaacaactggggattccggcccaagagacccaacttcaagctcttcaacatccaggtcaaggaggtcacgcagaatgaaggcaccaagaccatcgccaataaccttaccagcacgattcaggtctttacggactcggaataccagctcccgtacgtcctcggctctgcgcaccagggctgcctgcctccgttcccggcggacgtcttcatgattcctcagtacgggtacctgactctgaacaatggcagtcaggccgtgggccgttcctccttctactgcctggagtactttccttctcaaatgctgagaacgggcaacaactttgagttcagctaccagtttgaggacgtgccttttcacagcagctacgcgcacagccaaagcctggaccggctgatgaaccccctcatcgaccagtacctgtactacctgtctcggactcagtccacgggaggtaccgcaggaactcagcagttgctattttctcaggccgggcctaataacatgtcggctcaggccaaaaactggctacccgggccctgctaccggcagcaacgcgtctccacgacactgtcgcaaaataacaacagcaactttgcctggaccggtgccaccaagtatcatctgaatggcagagactctctggtaaatcccggtgtcgctatggcaacccacaaggacgacgaagagcgattttttccgtccagcggagtcttaatgtttgggaaacagggagctggaaaagacaacgtggactatagcagcgttatgctaaccagtgaggaagaaattaaaaccaccaacccagtggccacagaacagtacggcgtggtggccgataacctgcaacagcaaaacgccgctcctattgtaggggccgtcaacagtcaaggagccttacctggcatggtctggcagaaccgggacgtgtacctgcagggtcctatctgggccaagattcctcacacggacggaaactttcatccctcgccgctgatgggaggctttggactgaaacacccgcctcctcagatcctgattaagaatacacctgttcccgcggatcctccaactaccttcagtcaagctaagctggcgtcgttcatcacgcagtacagcaccggacaggtcagcgtggaaattgaatgggagctgcagaaagaaaacagcaaacgctggaacccagagattcaatacacttccaactactacaaatctacaaatgtggactttgctgttaacacagatggcacttattctgagcctcgccccattggcacccgttacctcacccgtaatctgtaattgcttgttaatcaataaaccggttgattcgtttcagttgaactttggtctctgcgaagggcgaattc

SEQ ID NO: 98 - protein, 738 aa, Artificial Sequence
  source: /note="Description of Artificial Sequence: Synthetic polypeptide"
MAADGYLPDWLEDNLSEGIREWWDLKPGAPKPKANQQKQDDGRGLVLPGYKYLGPFNGLDKGEPVNAADAAALEHDKAYDQQLKAGDNPYLRYNHADAEFQERLQEDTSFGGNLGRAVFQAKKRVLEPLGLVEEGAKTAPGKKRPVEPSPQRSPDSSTGIGKKGQQPAKKRLNFGQTGDSESVPDPQPIGEPPAGPSGLGSGTMAAGGGAPMADNNEGADGVGSSSGNWHCDSTWLGDRVITTSTRTWALPTYNNHLYKQISNGTSGGSTNDNTYFGYSTPWGYFDFNRFHCHFSPRDWQRLINNNWGFRPKRPNFKLFNIQVKEVTQNEGTKTIANNLTSTIQVFTDSEYQLPYVLGSAHQGCLPPFPADVFMIPQYGYLTLNNGSQAVGRSSFYCLEYFPSQMLRTGNNFEFSYQFEDVPFHSSYAHSQSLDRLMNPLIDQYLYYLSRTQSTGGTAGTQQLLFSQAGPNNMSAQAKNWLPGPCYRQQRVSTTLSQNNNSNFAWTGATKYHLNGRDSLVNPGVAMATHKDDEERFFPSSGVLMFGKQGAGKDNVDYSSVMLTSEEEIKTTNPVATEQYGVVADNLQQQNAAPIVGAVNSQGALPGMVWQNRDVYLQGPIWAKIPHTDGNFHPSPLMGGFGLKHPPPQILIKNTPVPADPPTTFSQAKLASFITQYSTGQVSVEIEWELQKENSKRWNPEIQYTSNYYKSTNVDFAVNTDGTYSEPRPIGTRYLTRNL

SEQ ID NO: 99 - protein, 738 aa, Artificial Sequence
  source: /note="Description of Artificial Sequence: Synthetic polypeptide"
MAADGYLPDWLEDNLSEGIREWWDLKPGAPKPKANQQKQDDGRGLVLPGYKYLGPFNGLDKGEPVNAADAAALEHDKAYDQQLKAGDNPYLRYNHADAEFQERLQEDTSFGGNLGRAVFQAKKRVLEPLGLVEEAAKTAPGKKRPVEPSPQRSPDSSTGIGKKGQQPAKKRLNFGQTGDSESVPDPQPIGEPPAGPSGLGSGTMAAGGGAPMADNNEGADGVGSSSGNWHCDSTWLGDRVITTSTRTWALPTYNNHLYKQISNGTSGGSTNDNTYFGYSTPWGYFDFNRFHCHFSPRDWQRLINNNWGFRPKRLSFKLFNIQVKEVTQNEGTKTIANNLTSTIQVFTDSEYQLPYVLGSAHQGCLPPFPADVFMIPQYGYLTLNNGSQAVGRSSFYCLEYFPSQMLRTGNNFEFSYTFEDVPFHSSYAHSQSLDRLMNPLIDQYLYYLSRTQSTGGTQGTQQLLFSQAGPANMSAQAKNWLPGPCYRQQRVSTTLSQNNNSNFAWTGATKYHLNGRDSLVNPGVAMATHKDDEERFFPSSGVLMFGKQGAGRDNVDYSSVMLTSEEEIKTTNPVATEQYGVVADNLQQTNTGPIVGNVNSQGALPGMVWQNRDVYLQGPIWAKIPHTDGNFHPSPLMGGFGLKHPPPQILIKNTPVPADPPTTFSQAKLASFITQYSTGQVSVEIEWELQKENSKRWNPEIQYTSNYYKSTNVDFAVNTEGTYSEPRPIGTRYLTRNL

SEQ ID NO: 100 - DNA, 2172 bp, Artificial Sequence
  source: /note="Description of Artificial Sequence: Synthetic polynucleotide"
atgtcttttgttgatcaccctccagattggttggaagaagttggtgaaggtcttcgcgagtttttgggccttgaagcgggcccaccgaaaccaaaacccaatcagcagcatcaagatcaagcccgtggtcttgtgctgcctggttataactatctcggacccggaaacggtctcgatcgaggagagcctgtcaacagggcagacgaggtcgcgcgagagcacgacatctcgtacaacgagcagcttgaggcgggagacaacccctacctcaagtacaaccacgcggacgccgagtttcaggagaagctcgccgacgacacatccttcgggggaaacctcggaaaggcagtctttcaggccaagaaaagggttctcgaaccttttggcctggttgaagagggtgctaagacggcccctaccggaaagcggatagacgaccactttccaaaaagaaagaaggctcggaccgaagaggactccaagccttccacctcgtcagacgccgaagctggacccagcggatcccagcagctgcaaatcccagcccaaccagcctcaagtttgggagctgatacaatgtctgcgggaggtggcggcccattgggcgacaataaccaaggtgccgatggagtgggcaatgcctcgggagattggcattgcgattccacgtggatgggggacagagtcgtcaccaagtccacccgaacctgggtgctgcccagctacaacaaccaccagtaccgagagatcaaaagcggctccgtcgacggaagcaacgccaacgcctactttggatacagcaccccctgggggtactttgactttaaccgcttccacagccactggagcccccgagactggcaaagactcatcaacaactactggggcttcagaccccggtccctcagagtcaaaatcttcaacattcaagtcaaagaggtcacggtgcaggactccaccaccaccatcgccaacaacctcacctccaccgtccaagtgtttacggacgacgactaccagctgccctacgtcgtcggcaacgggaccgagggatgcctgccggccttccctccgcaggtctttacgctgccgcagtacggttacgcgacgctgaaccgcgacaacacagaaaatcccaccgagaggagcagcttcttctgcctagagtactttcccagcaagatgctgagaacgggcaacaactttgagtttacctacaactttgaggaggtgcccttccactccagcttcgctcccagtcagaacctgttcaagctggccaacccgctggtggaccagtacttgtaccgcttcgtgagcacaaataacactggcggagtccagttcaacaagaacctggccgggagatacgccaacacctacaaaaactggttcccggggcccatgggccgaacccagggctggaacctgggctccggggtcaaccgcgccagtgtcagcgccttcgccacgaccaataggatggagctcgagggcgcgagttaccaggtgcccccgcagccgaacggcatgaccaacaacctccagggcagcaacacctatgccctggagaacactatgatcttcaacagccagccggcgaacccgggcaccaccgccacgtacctcgagggcaacatgctcatcaccagcgagagcgagacgcagccggtgaaccgcgtggcgtacaacgtcggcgggcagatggccaccaacaaccagagctccaccactgcccccgcgaccggcacgtacaacctccaggaaatcgtgcccggcagcgtgtggatggagagggacgtgtacctccaaggacccatctgggccaagatcccagagacgggggcgcactttcacccctctccggccatgggcggattcggactcaaacacccaccgcccatgatgctcatcaagaacacgcctgtgcccggaaatatcaccagcttctcggacgtgcccgtcagcagcttcatcacccagtacagcaccgggcaggtcaccgtggagatggagtgggagctcaagaaggaaaactccaagaggtggaacccagagatccagtacacaaacaactacaacgacccccagtttgtggactttgccccggacagcaccggggaatacagaaccaccagacctatcggaacccgataccttacccgacccctt

SEQ ID NO: 101 - protein, 720 aa, Artificial Sequence
  source: /note="Description of Artificial Sequence: Synthetic polypeptide"
MSFVDHPPDWLEEVGEGLREFLGLEAGPPKPKPNQQHQDQARGLVLPGYNYLGPGNGLDRGEPVNRADEVAREHDISYNEQLEAGDNPYLKYNHADAEFQEKLADDTSFGGNLGKAVFQAKKRVLEPFGLVEEGAKTAPTGKRIDDHFPKRKKARTEEDSKPSTSSDAEAGPSGSQQLQIPAQPASSLGADTMSAGGGGPLGDNNQGADGVGNASGDWHCDSTWMGDRVVTKSTRTWVLPSYNNHQYREIKSGSVDGSNANAYFGYSTPWGYFDFNRFHSHWSPRDWQRLINNYWGFRPRSLRVKIFNIQVKEVTVQDSTTTIANNLTSTVQVFTDDDYQLPYVVGNGTEGCLPAFPPQVFTLPQYGYATLNRDNTENPTERSSFFCLEYFPSKMLRTGNNFEFTYNFEEVPFHSSFAPSQNLFKLANPLVDQYLYRFVSTNNTGGVQFNKNLAGRYANTYKNWFPGPMGRTQGWNLGSGVNRASVSAFATTNRMELEGASYQVPPQPNGMTNNLQGSNTYALENTMIFNSQPANPGTTATYLEGNMLITSESETQPVNRVAYNVGGQMATNNQSSTTAPATGTYNLQEIVPGSVWMERDVYLQGPIWAKIPETGAHFHPSPAMGGFGLKHPPPMMLIKNTPVPGNITSFSDVPVSSFITQYSTGQVTVEMEWELKKENSKRWNPEIQYTNNYNDPQFVDFAPDSTGEYRTTRPIGTRYL

SEQ ID NO: 102 - protein, 724 aa, Adeno-associated virus 5
MSFVDHPPDWLEEVGEGLREFLGLEAGPPKPKPNQQHQDQARGLVLPGYNYLGPGNGLDRGEPVNRADEVAREHDISYNEQLEAGDNPYLKYNHADAEFQEKLADDTSFGGNLGKAVFQAKKRVLEPFGLVEEGAKTAPTGKRIDDHFPKRKKARTEEDSKPSTSSDAEAGPSGSQQLQIPAQPASSLGADTMSAGGGGPLGDNNQGADGVGNASGDWHCDSTWMGDRVVTKSTRTWVLPSYNNHQYREIKSGSVDGSNANAYFGYSTPWGYFDFNRFHSHWSPRDWQRLINNYWGFRPRSLRVKIFNIQVKEVTVQDSTTTIANNLTSTVQVFTDDDYQLPYVVGNGTEGCLPAFPPQVFTLPQYGYATLNRDNTENPTERSSFFCLEYFPSKMLRTGNNFEFTYNFEEVPFHSSFAPSQNLFKLANPLVDQYLYRFVSTNNTGGVQFNKNLAGRYANTYKNWFPGPMGRTQGWNLGSGVNRASVSAFATTNRMELEGASYQVPPQPNGMTNNLQGSNTYALENTMIFNSQPANPGTTATYLEGNMLITSESETQPVNRVAYNVGGQMATNNQSSTTAPATGTYNLQEIVPGSVWMERDVYLQGPIWAKIPETGAHFHPSPAMGGFGLKHPPPMMLIKNTPVPGNITSFSDVPVSSFITQYSTGQVTVEMEWELKKENSKRWNPEIQYTNNYNDPQFVDFAPDSTGEYRTTRPIGTRYLTRPL

SEQ ID NO: 103 - DNA, 2175 bp, Artificial Sequence
  source: /note="Description of Artificial Sequence: Synthetic polynucleotide"
atgtcttttgttgatcaccctccagattggttggaagaagttggtgaaggtcttcgcgagtttttgggccttgaagcgggcccaccgaaaccaaaacccaatcagcagcatcaagatcaagcccgtggtcttgtgctgcctggttataactatctcggacccggaaacggtctcgatcgaggagagcctgtcaacagggcagacgaggtcgcgcgagagcacgacatctcgtacaacgagcagcttgaggcgggagacaacccctacctcaagtacaaccacgcggacgccgagtttcaggagaagctcgccgacgacacatccttcgggggaaacctcggaaaggcagtctttcaggccaagaaaagggttctcgaaccttttggcctggttgaagagggtgctaagacggcccctaccggaaagcggatagacgaccactttccaaaaagaaagaaggctcggaccgaagaggactccaagccttccacctcgtcagacgccgaagctggacccagcggatcccagcagctgcaaatcccagcccaaccagcctcaagtttgggagctgatacaatgtctgcgggaggtggcggcccattgggcgacaataaccaaggtgccgatggagtgggcaatgcctcgggagattggcattgcgattccacgtggatgggggacagagtcgtcaccaagtccacccgaacctgggtgctgcccagctacaacaaccaccagtaccgagagatcaaaagcggctccgtcgacggaagcaacgccaacgcctactttggatacagcaccccctgggggtactttgactttaaccgcttccacagccactggagcccccgagactggcaaagactcatcaacaactactggggcttcagaccccggtccctcagagtcaaaatcttcaacattcaagtcaaagaggtcacggtgcaggactccaccaccaccatcgccaacaacctcacctccaccgtccaagtgtttacggacgacgactaccagctgccctacgtcgtcggcaacgggaccgagggatgcctgccggccttccctccgcaggtctttacgctgccgcagtacggttacgcgacgctgaaccgcgacaacacagaaaatcccaccgagaggagcagcttcttctgcctagagtactttcccagcaagatgctgagaacgggcaacaactttgagtttacctacaactttgaggaggtgcccttccactccagcttcgctcccagtcagaacctgttcaagctggccaacccgctggtggaccagtacttgtaccgcttcgtgagcacaaataacactggcggagtccagttcaacaagaacctggccgggagatacgccaacacctacaaaaactggttcccggggcccatgggccgaacccagggctggaacctgggctccggggtcaaccgcgccagtgtcagcgccttcgccacgaccaataggatggagctcgagggcgcgagttaccaggtgcccccgcagccgaacggcatgaccaacaacctccagggcagcaacacctatgccctggagaacactatgatcttcaacagccagccggcgaacccgggcaccaccgccacgtacctcgagggcaacatgctcatcaccagcgagagcgagacgcagccggtgaaccgcgtggcgtacaacgtcggcgggcagatggccaccaacaaccagagctccaccactgcccccgcgaccggcacgtacaacctccaggaaatcgtgcccggcagcgtgtggatggagagggacgtgtacctccaaggacccatctgggccaagatcccagagacgggggcgcactttcacccctctccggccatgggcggattcggactcaaacacccaccgcccatgatgctcatcaagaacacgcctgtgcccggaaatatcaccagcttctcggacgtgcccgtcagcagcttcatcacccagtacagcaccgggcaggtcaccgtggagatggagtgggagctcaagaaggaaaactccaagaggtggaacccagagatccagtacacaaacaactacaacgacccccagtttgtggactttgccccggacagcaccggggaatacagaaccaccagacctatcggaacccgataccttacccgacccctttaa

SEQ ID NO: 104 - DNA, 2208 bp, Artificial Sequence
  source: /note="Description of Artificial Sequence: Synthetic polynucleotide"
atggctgccgatggttatcttccagattggctcgaggacaacctctctgagggcattcgcgagtggtgggacttgaaacctggagccccgaaacccaaagccaaccagcaaaagcaggacgacggccggggtctggtgcttcctggctacaagtacctcggacccttcaacggactcgacaagggggagcccgtcaacgcggcggatgcagcggccctcgagcacgacaaggcctacgaccagcagctcaaagcgggtgacaatccgtacctgcggtataaccacgccgacgccgagtttcaggagcgtctgcaagaagatacgtcttttgggggcaacctcgggcgagcagtcttccaggccaagaagagggttctcgaaccttttggtctggttgaggaaggtgctaagacggctcctggaaagaaacgtccggtagagcagtcgccacaagagccagactcctcctcgggcattggcaagacaggccagcagcccgctaaaaagagactcaattttggtcagactggcgactcagagtcagtccccgacccacaacctctcggagaacctccagcaacccccgctgctgtgggacctactacaatggcttcaggcggtggcgcaccaatggcagacaataacgaaggcgccgacggagtgggtaatgcctcaggaaattggcattgcgattccacatggctgggcgacagagtcatcaccaccagcacccgaacatgggccttgcccacctataacaaccacctctacaagcaaatctccagtgcttcaacgggggccagcaacgacaaccactacttcggctacagcaccccctgggggtattttgatttcaacagattccactgccatttctcaccacgtgactggcagcgactcatcaacaacaattggggattccggcccaagagactcaacttcaagctcttcaacatccaagtcaaggaggtcacgacgaatgatggcgtcacgaccatcgctaataaccttaccagcacggttcaagtcttctcggactcggagtaccagttgccgtacgtcctcggctctgcgcaccagggctgcctccctccgttcccggcggacgtgttcatgattccgcagtacggctacctaacgctcaacaatggcagccaggcagtgggacggtcatccttttactgcctggaatatttcccatcgcagatgctgagaacgggcaataactttaccttcagctacaccttcgaggacgtgcctttccacagcagctacgcgcacagccagagcctggaccggctgatgaatcctctcatcgaccagtacctgtattacctgaacagaactcagaatcagtccggaagtgcccaaaacaaggacttgctgtttagccgggggtctccagctggcatgtctgttcagcccaaaaactggctacctggaccctgttaccggcagcagcgcgtttctaaaacaaaaacagacaacaacaacagcaactttacctggactggtgcttcaaaatataaccttaatgggcgtgaatctataatcaaccctggcactgctatggcctcacacaaagacgacaaagacaagttctttcccatgagcggtgtcatgatttttggaaaggagagcgccggagcttcaaacactgcattggacaatgtcatgatcacagacgaagaggaaatcaaagccactaaccccgtggccaccgaaagatttgggactgtggcagtcaatctccagagcagcagcacagaccctgcgaccggagatgtgcatgttatgggagccttacctggaatggtgtggcaagacagagacgtatacctgcagggtcctatttgggccaaaattcctcacacggatggacactttcacccgtctcctctcatgggcggctttggacttaagcacccgcctcctcagatcctcatcaaaaacacgcctgttcctgcgaatcctccggcagagttttcggctacaaagtttgcttcattcatcacccagtattccacaggacaagtgagcgtggagattgaatgggagctgcagaaagaaaacagcaaacgctggaatcccgaagtgcagtatacatctaactatgcaaaatctgccaacgttgatttcactgtggacaacaatggactttatactgagcctcgccccattggcacccgttacctcacccgtcccctg

SEQ ID NO: 105 - protein, 736 aa, Adeno-associated virus 6
MAADGYLPDWLEDNLSEGIREWWDLKPGAPKPKANQQKQDDGRGLVLPGYKYLGPFNGLDKGEPVNAADAAALEHDKAYDQQLKAGDNPYLRYNHADAEFQERLQEDTSFGGNLGRAVFQAKKRVLEPFGLVEEGAKTAPGKKRPVEQSPQEPDSSSGIGKTGQQPAKKRLNFGQTGDSESVPDPQPLGEPPATPAAVGPTTMASGGGAPMADNNEGADGVGNASGNWHCDSTWLGDRVITTSTRTWALPTYNNHLYKQISSASTGASNDNHYFGYSTPWGYFDFNRFHCHFSPRDWQRLINNNWGFRPKRLNFKLFNIQVKEVTTNDGVTTIANNLTSTVQVFSDSEYQLPYVLGSAHQGCLPPFPADVFMIPQYGYLTLNNGSQAVGRSSFYCLEYFPSQMLRTGNNFTFSYTFEDVPFHSSYAHSQSLDRLMNPLIDQYLYYLNRTQNQSGSAQNKDLLFSRGSPAGMSVQPKNWLPGPCYRQQRVSKTKTDNNNSNFTWTGASKYNLNGRESIINPGTAMASHKDDKDKFFPMSGVMIFGKESAGASNTALDNVMITDEEEIKATNPVATERFGTVAVNLQSSSTDPATGDVHVMGALPGMVWQDRDVYLQGPIWAKIPHTDGHFHPSPLMGGFGLKHPPPQILIKNTPVPANPPAEFSATKFASFITQYSTGQVSVEIEWELQKENSKRWNPEVQYTSNYAKSANVDFTVDNNGLYTEPRPIGTRYLTRPL

SEQ ID NO: 106 - protein, 623 aa, Adeno-associated virus 6
MPGFYEIVIKVPSDLDEHLPGISDSFVNWVAEKEWELPPDSDMDLNLIEQAPLTVAEKLQRDFLVQWRRVSKAPEALFFVQFEKGESYFHLHILVETTGVKSMVLGRFLSQIRDKLVQTIYRGIEPTLPNWFAVTKTRNGAGGGNKVVDECYIPNYLLPKTQPELQWAWTNMEEYISACLNLAERKRLVAHDLTHVSQTQEQNKENLNPNSDAPVIRSKTSARYMELVGWLVDRGITSEKQWIQEDQASYISFNAASNSRSQIKAALDNAGKIMALTKSAPDYLVGPAPPADIKTNRIYRILELNGYDPAYAGSVFLGWAQKRFGKRNTIWLFGPATTGKTNIAEAIAHAVPFYGCVNWTNENFPFNDCVDKMVIWWEEGKMTAKVVESAKAILGGSKVRVDQKCKSSAQIDPTPVIVTSNTNMCAVIDGNSTTFEHQQPLQDRMFKFELTRRLEHDFGKVTKQEVKEFFRWAQDHVTEVAHEFYVRKGGANKRPAPDDADKSEPKRACPSVADPSTSDAEGAPVDFADRYQNKCSRHAGMLQMLFPCKTCERMNQNFNICFTHGTRDCSECFPGVSESQPVVRKRTYRKLCAIHHLLGRAPEIACSACDLVNVDLDDCVSEQ

SEQ ID NO: 107 - DNA, 4683 bp, Adeno-associated virus 6
ttggccactccctctctgcgcgctcgctcgctcactgaggccgggcgaccaaaggtcgcccgacgcccgggctttgcccgggcggcctcagtgagcgagcgagcgcgcagagagggagtggccaactccatcactaggggttcctggaggggtggagtcgtgacgtgaattacgtcatagggttagggaggtcctgtattagaggtcacgtgagtgttttgcgacattttgcgacaccatgtggtcacgctgggtatttaagcccgagtgagcacgcagggtctccattttgaagcgggaggtttgaacgcgcagcgccatgccggggttttacgagattgtgattaaggtccccagcgaccttgacgagcatctgcccggcatttctgacagctttgtgaactgggtggccgagaaggaatgggagttgccgccagattctgacatggatctgaatctgattgagcaggcacccctgaccgtggccgagaagctgcagcgcgacttcctggtccagtggcgccgcgtgagtaaggccccggaggccctcttctttgttcagttcgagaagggcgagtcctacttccacctccatattctggtggagaccacgggggtcaaatccatggtgctgggccgcttcctgagtcagattagggacaagctggtgcagaccatctaccgcgggatcgagccgaccctgcccaactggttcgcggtgaccaagacgcgtaatggcgccggaggggggaacaaggtggtggacgagtgctacatccccaactacctcctgcccaagactcagcccgagctgcagtgggcgtggactaacatggaggagtatataagcgcgtgtttaaacctggccgagcgcaaacggctcgtggcgcacgacctgacccacgtcagccagacccaggagcagaacaaggagaatctgaaccccaattctgacgcgcctgtcatccggtcaaaaacctccgcacgctacatggagctggtcgggtggctggtggaccggggcatcacctccgagaagcagtggatccaggaggaccaggcctcgtacatctccttcaacgccgcctccaactcgcggtcccagatcaaggccgctctggacaatgccggcaagatcatggcgctgaccaaatccgcgcccgactacctggtaggccccgctccgcccgccgacattaaaaccaaccgcatttaccgcatcctggagctgaacggctacgaccctgcctacgccggctccgtctttctcggctgggcccagaaaaggttcggaaaacgcaacaccatctggctgtttgggccggccaccacgggcaagaccaacatcgcggaagccatcgcccacgccgtgcccttctacggctgcgtcaactggaccaatgagaactttcccttcaacgattgcgtcgacaagatggtgatctggtgggaggagggcaagatgacggccaaggtcgtggagtccgccaaggccattctcggcggcagcaaggtgcgcgtggaccaaaagtgcaagtcgtccgcccagatcgatcccacccccgtgatcgtcacctccaacaccaacatgtgcgccgtgattgacgggaacagcaccaccttcgagcaccagcagccgttgcaggaccggatgttcaaatttgaactcacccgccgtctggagcatgactttggcaaggtgacaaagcaggaagtcaaagagttcttccgctgggcgcaggatcacgtgaccgaggtggcgcatgagttctacgtcagaaagggtggagccaacaagagacccgcccccgatgacgcggataaaagcgagcccaagcgggcctgcccctcagtcgcggatccatcgacgtcagacgcggaaggagctccggtggactttgccgacaggtaccaaaacaaatgttctcgtcacgcgggcatgcttcagatgctgtttccctgcaaaacatgcgagagaatgaatcagaatttcaacatttgcttcacgcacgggaccagagactgttcagaatgtttccccggcgtgtcagaatctcaaccggtcgtcagaaagaggacgtatcggaaactctgtgccattcatcatctgctggggcgggctcccgagattgcttgctcggcctgcgatctggtcaacgtggatctggatgactgtgtttctgagcaataaatgacttaaaccaggtatggctgccgatggttatcttccagattggctcgaggacaacctctctgagggcattcgcgagtggtgggacttgaaacctggagccccgaaacccaaagccaaccagcaaaagcaggacgacggccggggtctggtgcttcctggctacaagtacctcggacccttcaacggactcgacaagggggagcccgtcaacgcggcggatgcagcggccctcgagcacgacaaggcctacgaccagcagctcaaagcgggtgacaatccgtacctgcggtataaccacgccgacgccgagtttcaggagcgtctgcaagaagatacgtcttttgggggcaacctcgggcgagcagtcttccaggccaagaagagggttctcgaaccttttggtctggttgaggaaggtgctaagacggctcctggaaagaaacgtccggtagagcagtcgccacaagagccagactcctcctcgggcattggcaagacaggccagcagcccgctaaaaagagactcaattttggtcagactggcgactcagagtcagtccccgacccacaacctctcggagaacctccagcaacccccgctgctgtgggacctactacaatggcttcaggcggtggcgcaccaatggcagacaataacgaaggcgccgacggagtgggtaatgcctcaggaaattggcattgcgattccacatggctgggcgacagagtcatcaccaccagcacccgaacatgggccttgcccacctataacaaccacctctacaagcaaatctccagtgcttcaacgggggccagcaacgacaaccactacttcggctacagcaccccctgggggtattttgatttcaacagattccactgccatttctcaccacgtgactggcagcgactcatcaacaacaattggggattccggcccaagagactcaacttcaagctcttcaacatccaagtcaaggaggtcacgacgaatgatggcgtcacgaccatcgctaataaccttaccagcacggttcaagtcttctcggactcggagtaccagttgccgtacgtcctcggctctgcgcaccagggctgcctccctccgttcccggcggacgtgttcatgattccgcagtacggctacctaacgctcaacaatggcagccaggcagtgggacggtcatccttttactgcctggaatatttcccatcgcagatgctgagaacgggcaataactttaccttcagctacaccttcgaggacgtgcctttccacagcagctacgcgcacagccagagcctggaccggctgatgaatcctctcatcgaccagtacctgtattacctgaacagaactcagaatcagtccggaagtgcccaaaacaaggacttgctgtttagccgggggtctccagctggcatgtctgttcagcccaaaaactggctacctggaccctgttaccggcagcagcgcgtttctaaaacaaaaacagacaacaacaacagcaactttacctggactggtgcttcaaaatataaccttaatgggcgtgaatctataatcaaccctggcactgctatggcctcacacaaagacgacaaagacaagttctttcccatgagcggtgtcatgatttttggaaaggagagcgccggagcttcaaacactgcattggacaatgtcatgatcacagacgaagaggaaatcaaagccactaaccccgtggccaccgaaagatttgggactgtggcagtcaatctccagagcagcagcacagaccctgcgaccggagatgtgcatgttatgggagccttacctggaatggtgtggcaagacagagacgtatacctgcagggtcctatttgggccaaaattcctcacacggatggacactttcacccgtctcctctcatgggcggctttggacttaagcacccgcctcctcagatcctcatcaaaaacacgcctgttcctgcgaatcctccggcagagttttcggctacaaagtttgcttcattcatcacccagtattccacaggacaagtgagcgtggagattgaatgggagctgcagaaagaaaacagcaaacgctggaatcccgaagtgcagtatacatctaactatgcaaaatctgccaacgttgatttcactgtggacaacaatggactttatactgagcctcgccccattggcacccgttacctcacccgtcccctgtaattgtgtgttaatcaataaaccggttaattcgtgtcagttgaactttggtctcatgtcgttattatcttatctggtcaccatagcaaccggttacacattaactgcttagttgcgcttcgcgaatacccctagtgatggagttgcccactccctctatgcgcgctcgctcgctcggtggggccggcagagcagagctctgccgtctgcggacctttggtccgcaggccccaccgagcgagcgagcgcgcatagagggagtgggcaa

SEQ ID NO: 108 - DNA, 2211 bp, Artificial Sequence
  source: /note="Description of Artificial Sequence: Synthetic polynucleotide"
atggctgccgatggttatcttccagattggctcgaggacaacctctctgagggcattcgcgagtggtgggacttgaaacctggagccccgaaacccaaagccaaccagcaaaagcaggacgacggccggggtctggtgcttcctggctacaagtacctcggacccttcaacggactcgacaagggggagcccgtcaacgcggcggatgcagcggccctcgagcacgacaaggcctacgaccagcagctcaaagcgggtgacaatccgtacctgcggtataaccacgccgacgccgagtttcaggagcgtctgcaagaagatacgtcttttgggggcaacctcgggcgagcagtcttccaggccaagaagagggttctcgaaccttttggtctggttgaggaaggtgctaagacggctcctggaaagaaacgtccggtagagcagtcgccacaagagccagactcctcctcgggcattggcaagacaggccagcagcccgctaaaaagagactcaattttggtcagactggcgactcagagtcagtccccgacccacaacctctcggagaacctccagcaacccccgctgctgtgggacctactacaatggcttcaggcggtggcgcaccaatggcagacaataacgaaggcgccgacggagtgggtaatgcctcaggaaattggcattgcgattccacatggctgggcgacagagtcatcaccaccagcacccgaacatgggccttgcccacctataacaaccacctctacaagcaaatctccagtgcttcaacgggggccagcaacgacaaccactacttcggctacagcaccccctgggggtattttgatttcaacagattccactgccatttctcaccacgtgactggcagcgactcatcaacaacaattggggattccggcccaagagactcaacttcaagctcttcaacatccaagtcaaggaggtcacgacgaatgatggcgtcacgaccatcgctaataaccttaccagcacggttcaagtcttctcggactcggagtaccagttgccgtacgtcctcggctctgcgcaccagggctgcctccctccgttcccggcggacgtgttcatgattccgcagtacggctacctaacgctcaacaatggcagccaggcagtgggacggtcatccttttactgcctggaatatttcccatcgcagatgctgagaacgggcaataactttaccttcagctacaccttcgaggacgtgcctttccacagcagctacgcgcacagccagagcctggaccggctgatgaatcctctcatcgaccagtacctgtattacctgaacagaactcagaatcagtccggaagtgcccaaaacaaggacttgctgtttagccgggggtctccagctggcatgtctgttcagcccaaaaactggctacctggaccctgttaccggcagcagcgcgtttctaaaacaaaaacagacaacaacaacagcaactttacctggactggtgcttcaaaatataaccttaatgggcgtgaatctataatcaaccctggcactgctatggcctcacacaaagacgacaaagacaagttctttcccatgagcggtgtcatgatttttggaaaggagagcgccggagcttcaaacactgcattggacaatgtcatgatcacagacgaagaggaaatcaaagccactaaccccgtggccaccgaaagatttgggactgtggcagtcaatctccagagcagcagcacagaccctgcgaccggagatgtgcatgttatgggagccttacctggaatggtgtggcaagacagagacgtatacctgcagggtcctatttgggccaaaattcctcacacggatggacactttcacccgtctcctctcatgggcggctttggacttaagcacccgcctcctcagatcctcatcaaaaacacgcctgttcctgcgaatcctccggcagagttttcggctacaaagtttgcttcattcatcacccagtattccacaggacaagtgagcgtggagattgaatgggagctgcagaaagaaaacagcaaacgctggaatcccgaagtgcagtatacatctaactatgcaaaatctgccaacgttgatttcactgtggacaacaatggactttatactgagcctcgccccattggcacccgttacctcacccgtcccctgtaa

SEQ ID NO: 109 - protein, 736 aa, Artificial Sequence; identical to SEQ ID NO: 105
  source: /note="Description of Artificial Sequence: Synthetic polypeptide"

SEQ ID NO: 110 - protein, 736 aa, Artificial Sequence
  source: /note="Description of Artificial Sequence: Synthetic polypeptide"
MAADGYLPDWLEDNLSEGIREWWDLKPGAPKPKANQQKQDDGRGLVLPGYKYLGPFNGLDKGEPVNAADAAALEHDKAYDQQLKAGDNPYLRYNHADAEFQERLQEDTSFGGNLGRAVFQAKKRVLEPFGLVEEGAKTAPGKKRPVEQSPQEPDSSSGIGKTGQQPAKKRLNFGQTGDSESVPDPQPLGEPPATPAAVGPTTMASGGGAPMADNNEGADGVGNASGNWHCDSTWLGDRVITTSTRTWALPTYNNHLYKQISSASTGASNDNHYFGYSTPWGYFDFNRFHCHFSPRDWQRLINNNWGFRPKRLNFKLFNIQVKEVTTNDGVTTIANNLTSTVQVFSDSEYQLPYVLGSAHQGCLPPFPADVFMIPQYGYLTLNNGSQAVGRSSFYCLEYFPSQMLRTGNNFTFSYTFEDVPFHSSYAHSQSLDRLMNPLIDQYLYYLNRTQNQSGSAQNKDLLFSRGSPAGMSVQPKNWLPGPCYRQQRVSKTKTDNNNSNFTWTGASKYNLNGRESIINPGTAMASHKDDEDKFFPMSGVMIFGKESAGASNTALDNVMITDEEEIKATNPVATERFGTVAVNLQSSSTDPATGDVHVMGALPGMVWQDRDVYLQGPIWAKIPHTDGHFHPSPLMGGFGLKHPPPQILIKNTPVPANPPAEFSATKFASFITQYSTGQVSVEIEWELQKENSKRWNPEVQYTSNYAKSANVDFTVDNNGLYTEPRPIGTRYLTRPL

SEQ ID NO: 111 - protein, 736 aa, Artificial Sequence
  source: /note="Description of Artificial Sequence: Synthetic polypeptide"
MAADGYLPDWLEDNLSEGIREWWDLKPGAPKPKANQQKQDDGRGLVLPGYKYLGPFNGLDKGEPVNAADAAALEHDKAYDQQLKAGDNPYLRYNHADAEFQERLQEDTSFGGNLGRAVFQAKKRVLEPLGLVEEGAKTAPGKKRPVEQSPQEPDSSSGIGKTGQQPAKKRLNFGQTGDSESVPDPQPLGEPPATPAAVGPTTMASGGGAPMADNNEGADGVGNASGNWHCDSTWLGDRVITTSTRTWALPTYNNHLYKQISSASTGASNDNHYFGYSTPWGYFDFNRFHCHFSPRDWQRLINNNWGFRPKRLNFKLFNIQVKEVTTNDGVTTIANNLTSTVQVFSDSEYQLPYVLGSAHQGCLPPFPADVFMIPQYGYLTLNNGSQAVGRSSFYCLEYFPSQMLRTGNNFTFSYTFEDVPFHSSYAHSQSLDRLMNPLIDQYLYYLNRTQNQSGSAQNKDLLFSRGSPAGMSVQPKNWLPGPCYRQQRVSKTKTDNNNSNFTWTGASKYNLNGRESIINPGTAMASHKDDEDKFFPMSGVMIFGKESAGASNTALDNVMITDEEEIKATNPVATERFGTVAVNLQSSSTDPATGDVHVMGALPGMVWQDRDVYLQGPIWAKIPHTDGHFHPSPLMGGFGLKHPPPQILIKNTPVPANPPAEFSATKFASFITQYSTGQVSVEIEWELQKENSKRWNPEVQYTSNYAKSANVDFTVDNNGLYTEPRPIGTRYLTRPL

SEQ ID NO: 112 - protein, 736 aa, Artificial Sequence
  source: /note="Description of Artificial Sequence: Synthetic polypeptide"
MAADGYLPDWLEDNLSEGIREWWDLKPGAPKPKANQQKQDDGRGLVLPGYKYLGPFNGLDKGEPVNAADAAALEHDKAYDQQLKAGDNPYLRYNHADAEFQERLQEDTSFGGNLGRAVFQAKKRVLEPLGLVEEGAKTAPGKKRPVEQSPQEPDSSSGIGKTGQQPAKKRLNFGQTGDSESVPDPQPLGEPPATPAAVGPTTMASGGGAPMADNNEGADGVGNASGNWHCDSTWLGDRVITTSTRTWALPTYNNHLYKQISSASTGASNDNHYFGYSTPWGYFDFNRFHCHFSPRDWQRLINNNWGFRPKRLNFKLFNIQVKEVTTNDGVTTIANNLTSTVQVFSDSEYQLPYVLGSAHQGCLPPFPADVFMIPQYGYLTLNNGSQAVGRSSFYCLEYFPSQMLRTGNNFTFSYTFEDVPFHSSYAHSQSLDRLMNPLIDQYLYYLNRTQNQSGSAQNKDLLFSRGSPAGMSVQPKNWLPGPCYRQQRVSKTKTDNNNSNFTWTGASKYNLNGRESIINPGTAMASHKDDKDKFFPMSGVMIFGKESAGASNTALDNVMITDEEEIKATNPVATERFGTVAVNLQSSSTDPATGDVHVMGALPGMVWQDRDVYLQGPIWAKIPHTDGHFHPSPLMGGFGLKHPPPQILIKNTPVPANPPAEFSATKFASFITQYSTGQVSVEIEWELQKENSKRWNPEVQYTSNYAKSANVDFTVDNNGLYTEPRPIGTRYLTRPL

SEQ ID NO: 113 - DNA, 2214 bp, Artificial Sequence
  source: /note="Description of Artificial Sequence: Synthetic polynucleotide"
atggctgccgatggttatcttccagattggctcgaggacaacctctctgagggcattcgcgagtggtgggacctgaaacctggagccccgaaacccaaagccaaccagcaaaagcaggacaacggccggggtctggtgcttcctggctacaagtacctcggacccttcaacggactcgacaagggggagcccgtcaacgcggcggacgcagcggccctcgagcacgacaaggcctacgaccagcagctcaaagcgggtgacaatccgtacctgcggtataaccacgccgacgccgagtttcaggagcgtctgcaagaagatacgtcatttgggggcaacctcgggcgagcagtcttccaggccaagaagcgggttctcgaacctctcggtctggttgaggaaggcgctaagacggctcctgcaaagaagagaccggtagagccgtcacctcagcgttcccccgactcctccacgggcatcggcaagaaaggccagcagcccgccagaaagagactcaatttcggtcagactggcgactcagagtcagtccccgaccctcaacctctcggagaacctccagcagcgccctctagtgtgggatctggtacagtggctgcaggcggtggcgcaccaatggcagacaataacgaaggtgccgacggagtgggtaatgcctcaggaaattggcattgcgattccacatggctgggcgacagagtcattaccaccagcacccgaacctgggccctgcccacctacaacaaccacctctacaagcaaatctccagtgaaactgcaggtagtaccaacgacaacacctacttcggctacagcaccccctgggggtattttgactttaacagattccactgccacttctcaccacgtgactggcagcgactcatcaacaacaactggggattccggcccaagaagctgcggttcaagctcttcaacatccaggtcaaggaggtcacgacgaatgacggcgttacgaccatcgctaataaccttaccagcacgattcaggtattctcggactcggaataccagctgccgtacgtcctcggctctgcgcaccagggctgcctgcctccgttcccggcggacgtcttcatgattcctcagtacggctacctgactctcaacaatggcagtcagtctgtgggacgttcctccttctactgcctggagtacttcccctctcagatgctgagaacgggcaacaactttgagttcagctacagcttcgaggacgtgcctttccacagcagctacgcacacagccagagcctggaccggctgatgaatcccctcatcgaccagtacttgtactacctggccagaacacagagtaacccaggaggcacagctggcaatcgggaactgcagttttaccagggcgggccttcaactatggccgaacaagccaagaattggttacctggaccttgcttccggcaacaaagagtctccaaaacgctggatcaaaacaacaacagcaactttgcttggactggtgccaccaaatatcacctgaacggcagaaactcgttggttaatcccggcgtcgccatggcaactcacaaggacgacgaggaccgctttttcccatccagcggagtcctgatttttggaaaaactggagcaactaacaaaactacattggaaaatgtgttaatgacaaatgaagaagaaattcgtcctactaatcctgtagccacggaagaatacgggatagtcagcagcaacttacaagcggctaatactgcagcccagacacaagttgtcaacaaccagggagccttacctggcatggtctggcagaaccgggacgtgtacctgcagggtcccatctgggccaagattcctcacacggatggcaactttcacccgtctcctttgatgggcggctttggacttaaacatccgcctcctcagatcctgatcaagaacactcccgttcccgctaatcctccggaggtgtttactcctgccaagtttgcttcgttcatcacacagtacagcaccggacaagtcagcgtggaaatcgagtgggagctgcagaaggaaaacagcaagcgctggaacccggagattcagtacacctccaactttgaaaagcagactggtgtggactttgccgttgacagccagggtgtttactctgagcctcgccctattggcactcgttacctcacccgtaatctgtaa

SEQ ID NO: 114 - protein, 738 aa, Artificial Sequence
  source: /note="Description of Artificial Sequence: Synthetic polypeptide"
MAADGYLPDWLEDNLSEGIREWWALKPGAPKPKANQQKQDDGRGLVLPGYKYLGPFNGLDKGEPVNAADAAALEHDKAYDQQLQAGDNPYLRYNHADAEFQERLQEDTSFGGNLGRAVFQAKKRVLEPLGLVEEGAKTAPGKKRPVEPSPQRSPDSSTGIGKKGQQPARKRLNFGQTGDSESVPDPQPLGEPPAAPSGVGPNTMAAGGGAPMADNNEGADGVGSSSGNWHCDSTWLGDRVITTSTRTWALPTYNNHLYKQISNGTSGGATNDNTYFGYSTPWGYFDFNRFHCHFSPRDWQRLINNNWGFRPKRLSFKLFNIQVKEVTQNEGTKTIANNLTSTIQVFTDSEYQLPYVLGSAHQGCLPPFPADVFMIPQYGYLTLNNGSQAVGRSSFYCLEYFPSQMLRTGNNFQFTYTFEDVPFHSSYAHSQSLDRLMNPLIDQYLYYLSRTQTTGGTANTQTLGFSQGGPNTMANQAKNWLPGPCYRQQRVSTTTGQNNNSNFAWTAGTKYHLNGRNSLANPGIAMATHKDDEERFFPSNGILIFGKQNAARDNADYSDVMLTSEEEIKTTNPVATEEYGIVADNLQQQNTAPQIGTVNSQGALPGMVWQNRDVYLQGPIWAKIPHTDGNFHPSPLMGGFGLKHPPPQILIKNTPVPADPPTTFNQSKLNSFITQYSTGQVSVEIEWELQKENSKRWNPEIQYTSNYYKSTSVDFAVNTEGVYSEPRPIGTRYLTRNL

SEQ ID NO: 115 - protein, 737 aa, Adeno-associated virus 7
MAADGYLPDWLEDNLSEGIREWWDLKPGAPKPKANQQKQDNGRGLVLPGYKYLGPFNGLDKGEPVNAADAAALEHDKAYDQQLKAGDNPYLRYNHADAEFQERLQEDTSFGGNLGRAVFQAKKRVLEPLGLVEEGAKTAPAKKRPVEPSPQRSPDSSTGIGKKGQQPARKRLNFGQTGDSESVPDPQPLGEPPAAPSSVGSGTVAAGGGAPMADNNEGADGVGNASGNWHCDSTWLGDRVITTSTRTWALPTYNNHLYKQISSETAGSTNDNTYFGYSTPWGYFDFNRFHCHFSPRDWQRLINNNWGFRPKKLRFKLFNIQVKEVTTNDGVTTIANNLTSTIQVFSDSEYQLPYVLGSAHQGCLPPFPADVFMIPQYGYLTLNNGSQSVGRSSFYCLEYFPSQMLRTGNNFEFSYSFEDVPFHSSYAHSQSLDRLMNPLIDQYLYYLARTQSNPGGTAGNRELQFYQGGPSTMAEQAKNWLPGPCFRQQRVSKTLDQNNNSNFAWTGATKYHLNGRNSLVNPGVAMATHKDDEDRFFPSSGVLIFGKTGATNKTTLENVLMTNEEEIRPTNPVATEEYGIVSSNLQAANTAAQTQVVNNQGALPGMVWQNRDVYLQGPIWAKIPHTDGNFHPSPLMGGFGLKHPPPQILIKNTPVPANPPEVFTPAKFASFITQYSTGQVSVEIEWELQKENSKRWNPEIQYTSNFEKQTGVDFAVDSQGVYSEPRPIGTRYLTRNL

SEQ ID NO: 116 - protein, 623 aa, Adeno-associated virus 7
MPGFYEIVIKVPSDLDEHLPGISDSFVNWVAEKEWELPPDSDMDLNLIEQAPLTVAEKLQRDFLVQWRRVSKAPEALFFVQFEKGESYFHLHVLVETTGVKSMVLGRFLSQIREKLVQTIYRGVEPTLPNWFAVTKTRNGAGGGNKVVDECYIPNYLLPKTQPELQWAWTNMEEYISACLNLAERKRLVAQHLTHVSQTQEQNKENLNPNSDAPVIRSKTSARYMELVGWLVDRGITSEKQWIQEDQASYISFNAASNSRSQIKAALDNAGKIMALTKSAPDYLVGPSLPADIKTNRIYRILELNGYDPAYAGSVFLGWAQKKFGKRNTIWLFGPATTGKTNIAEAIAHAVPFYGCVNWTNENFPFNDCVDKMVIWWEEGKMTAKVVESAKAILGGSKVRVDQKCKSSAQIDPTPVIVTSNTNMCAVIDGNSTTFEHQQPLQDRMFKFELTRRLEHDFGKVTKQEVKEFFRWASDHVTEVAHEFYVRKGGASKRPAPDDADISEPKRACPSVADPSTSDAEGAPVDFADRYQNKCSRHAGMIQMLFPCKTCERMNQNFNICFTHGVRDCLECFPGVSESQPVVRKKTYRKLCAIHHLLGRAPEIACSACDLVNVDLDDCVSEQ

SEQ ID NO: 117 - DNA, 4721 bp, Adeno-associated virus 7
ttggccactccctctatgcgcgctcgctcgctcggtggggcctgcggaccaaaggtccgcagacggcagagctctgctctgccggccccaccgagcgagcgagcgcgcatagagggagtggccaactccatcactaggggtaccgcgaagcgcctcccacgctgccgcgtcagcgctgacgtaaatcacgtcataggggagtggtcctgtattagctgtcacgtgagtgcttttgcgacattttgcgacaccacgtggccatttgaggtatatatggccgagtgagcgagcaggatctccattttgaccgcgaaatttgaacgagcagcagccatgccgggtttctacgagatcgtgatcaaggtgccgagcgacctggacgagcacctgccgggcatttctgactcgtttgtgaactgggtggccgagaaggaatgggagctgcccccggattctgacatggatctgaatctgatcgagcaggcacccctgaccgtggccgagaagctgcagcgcgacttcctggtccaatggcgccgcgtgagtaaggccccggaggccctgttctttgttcagttcgagaagggcgagagctacttccaccttcacgttctggtggagaccacgggggtcaagtccatggtgctaggccgcttcctgagtcagattcgggagaagctggtccagaccatctaccgcggggtcgagcccacgctgcccaactggttcgcggtgaccaagacgcgtaatggcgccggcggggggaacaaggtggtggacgagtgctacatccccaactacctcctgcccaagacccagcccgagctgcagtgggcgtggactaacatggaggagtatataagcgcgtgtttgaacctggccgaacgcaaacggctcgtggcgcagcacctgacccacgtcagccagacgcaggagcagaacaaggagaatctgaaccccaattctgacgcgcccgtgatcaggtcaaaaacctccgcgcgctacatggagctggtcgggtggctggtggaccggggcatcacctccgagaagcagtggatccaggaggaccaggcctcgtacatctccttcaacgccgcctccaactcgcggtcccagatcaaggccgcgctggacaatgccggcaagatcatggcgctgaccaaatccgcgcccgactacctggtggggccctcgctgcccgcggacattaaaaccaaccgcatctaccgcatcctggagctgaacgggtacgatcctgcctacgccggctccgtctttctcggctgggcccagaaaaagttcgggaagcgcaacaccatctggctgtttgggcccgccaccaccggcaagaccaacattgcggaagccatcgcccacgccgtgcccttctacggctgcgtcaactggaccaatgagaactttcccttcaacgattgcgtcgacaagatggtgatctggtgggaggagggcaagatgacggccaaggtcgtggagtccgccaaggccattctcggcggcagcaaggtgcgcgtggaccaaaagtgcaagtcgtccgcccagatcgaccccacccccgtgatcgtcacctccaacaccaacatgtgcgccgtgattgacgggaacagcaccaccttcgagcaccagcagccgttgcaggaccggatgttcaaatttgaactcacccgccgtctggagcacgactttggcaaggtgacgaagcaggaagtcaaagagttcttccgctgggccagtgatcacgtgaccgaggtggcgcatgagttctacgtcagaaagggcggagccagcaaaagacccgcccccgatgacgcggatataagcgagcccaagcgggcctgcccctcagtcgcggatccatcgacgtcagacgcggaaggagctccggtggactttgccgacaggtaccaaaacaaatgttctcgtcacgcgggcatgattcagatgctgtttccctgcaaaacgtgcgagagaatgaatcagaatttcaacatttgcttcacacacggggtcagagactgtttagagtgtttccccggcgtgtcagaatctcaaccggtcgtcagaaaaaagacgtatcggaaactctgcgcgattcatcatctgctggggcgggcgcccgagattgcttgctcggcctgcgacctggtcaacgtggacctggacgactgcgtttctgagcaataaatgacttaaaccaggtatggctgccgatggttatcttccagattggctcgaggacaacctctctgagggcattcgcgagtggtgggacctgaaacctggagccccgaaacccaaagccaaccagcaaaagcaggacaacggccggggtctggtgcttcctggctacaagtacctcggacccttcaacggactcgacaagggggagcccgtcaacgcggcggacgcagcggccctcgagcacgacaaggcctacgaccagcagctcaaagcgggtgacaatccgtacctgcggtataaccacgccgacgccgagtttcaggagcgtctgcaagaagatacgtcatttgggggcaacctcgggcgagcagtcttccaggccaagaagcgggttctcgaacctctcggtctggttgaggaaggcgctaagacggctcctgcaaagaagagaccggtagagccgtcacctcagcgttcccccgactcctccacgggcatcggcaagaaaggccagcagcccgccagaaagagactcaatttcggtcagactggcgactcagagtcagtccccgaccctcaacctctcggagaacctccagcagcgccctctagtgtgggatctggtacagtggctgcaggcggtggcgcaccaatggcagacaataacgaaggtgccgacggagtgggtaatgcctcaggaaattggcattgcgattccacatggctgggcgacagagtcattaccaccagcacccgaacctgggccctgcccacctacaacaaccacctctacaagcaaatctccagtgaaactgcaggtagtaccaacgacaacacctacttcggctacagcaccccctgggggtattttgactttaacagattccactgccacttctcaccacgtgactggcagcgactcatcaacaacaactggggattccggcccaagaagctgcggttcaagctcttcaacatccaggtcaaggaggtcacgacgaatgacggcgttacgaccatcgctaataaccttaccagcacgattcaggtattctcggactcggaataccagctgccgtacgtcctcggctctgcgcaccagggctgcctgcctccgttcccggcggacgtcttcatgattcctcagtacggctacctgactctcaacaatggcagtcagtctgtgggacgttcctccttctactgcctggagtacttcccctctcagatgctgagaacgggcaacaactttgagttcagctacagcttcgaggacgtgcctttccacagcagctacgcacacagccagagcctggaccggctgatgaatcccctcatcgaccagtacttgtactacctggccagaacacagagtaacccaggaggcacagctggcaatcgggaactgcagttttaccagggcgggccttcaactatggccgaacaagccaagaattggttacctggaccttgcttccggcaacaaagagtctccaaaacgctggatcaaaacaacaacagcaactttgcttggactggtgccaccaaatatcacctgaacggcagaaactcgttggttaatcccggcgtcgccatggcaactcacaaggacgacgaggaccgctttttcccatccagcggagtcctgatttttggaaaaactggagcaactaacaaaactacattggaaaatgtgttaatgacaaatgaagaagaaattcgtcctactaatcctgtagccacggaagaatacgggatagtcagcagcaacttacaagcggctaatactgcagcccagacacaagttgtcaacaaccagggagccttacctggcatggtctggcagaaccgggacgtgtacctgcagggtcccatctgggccaagattcctcacacggatggcaactttcacccgtctcctttgatgggcggctttggacttaaacatccgcctcctcagatcctgatcaagaacactcccgttcccgctaatcctccggaggtgtttactcctgccaagtttgcttcgttcatcacacagtacagcaccggacaagtcagcgtggaaatcgagtgggagctgcagaaggaaaacagcaagcgctggaacccggagattcagtacacctccaactttgaaaagcagactggtgtggactttgccgttgacagccagggtgtttactctgagcctcgccctattggcactcgttacctcacccgtaatctgtaattgcatgttaatcaataaaccggttgattcgtttcagttgaactttggtctcctgtgcttcttatcttatcggtttccatagcaactggttacacattaactgcttgggtgcgcttcacgataagaacactgacgtcaccgcggtacccctagtgatggagttggccactccctctatgcgcgctcgctcgctcggtggggcctgcggaccaaaggtccgcagacggcagagctctgctctgccggccccaccgagcgagcgagcgcgcatagagggagtggccaa

SEQ ID NO: 118 - DNA, 2214 bp, Artificial Sequence; identical to SEQ ID NO: 113
  source: /note="Description of Artificial Sequence: Synthetic polynucleotide"

SEQ ID NO: 119 - protein, 737 aa, Artificial Sequence; identical to SEQ ID NO: 115
  source: /note="Description of Artificial Sequence: Synthetic polypeptide"

SEQ ID NO: 120 - DNA, 2217 bp, Artificial Sequence
  source: /note="Description of Artificial Sequence: Synthetic polynucleotide"
atggctgccgatggttatcttccagattggctcgaggacaacctctctgagggcattcgcgagtggtgggcgctgaaacctggagccccgaagcccaaagccaaccagcaaaagcaggacgacggccggggtctggtgcttcctggctacaagtacctcggacccttcaacggactcgacaagggggagcccgtcaacgcggcggacgcagcggccctcgagcacgacaaggcctacgaccagcagctgcaggcgggtgacaatccgtacctgcggtataaccacgccgacgccgagtttcaggagcgtctgcaagaagatacgtcttttgggggcaacctcgggcgagcagtcttccaggccaagaagcgggttctcgaacctctcggtctggttgaggaaggcgctaagacggctcctggaaagaagagaccggtagagccatcaccccagcgttctccagactcctctacgggcatcggcaagaaaggccaacagcccgccagaaaaagactcaattttggtcagactggcgactcagagtcagttccagaccctcaacctctcggagaacctccagcagcgccctctggtgtgggacctaatacaatggctgcaggcggtggcgcaccaatggcagacaataacgaaggcgccgacggagtgggtagttcctcgggaaattggcattgcgattccacatggctgggcgacagagtcatcaccaccagcacccgaacctgggccctgcccacctacaacaaccacctctacaagcaaatctccaacgggacatcgggaggagccaccaacgacaacacctacttcggctacagcaccccctgggggtattttgactttaacagattccactgccacttttcaccacgtgactggcagcgactcatcaacaacaactggggattccggcccaagagactcagcttcaagctcttcaacatccaggtcaaggaggtcacgcagaatgaaggcaccaagaccatcgccaataacctcaccagcaccatccaggtgtttacggactcggagtaccagctgccgtacgttctcggctctgcccaccagggctgcctgcctccgttcccggcggacgtgttcatgattccccagtacggctacctaacactcaacaacggtagtcaggccgtgggacgctcctccttctactgcctggaatactttccttcgcagatgctgagaaccggcaacaacttccagtttacttacaccttcgaggacgtgcctttccacagcagctacgcccacagccagagcttggaccggctgatgaatcctctgattgaccagtacctgtactacttgtctcggactcaaacaacaggaggcacggcaaatacgcagactctgggcttcagccaaggtgggcctaatacaatggccaatcaggcaaagaactggctgccaggaccctgttaccgccaacaacgcgtctcaacgacaaccgggcaaaacaacaatagcaactttgcctggactgctgggaccaaataccatctgaatggaagaaattcattggctaatcctggcatcgctatggcaacacacaaagacgacgaggagcgtttttttcccagtaacgggatcctgatttttggcaaacaaaatgctgccagagacaatgcggattacagcgatgtcatgctcaccagcgaggaagaaatcaaaaccactaaccctgtggctacagaggaatacggtatcgtggcagataacttgcagcagcaaaacacggctcctcaaattggaactgtcaacagccagggggccttacccggtatggtctggcagaaccgggacgtgtacctgcagggtcccatctgggccaagattcctcacacggacggcaacttccacccgtctccgctgatgggcggctttggcctgaaacatcctccgcctcagatcctgatcaagaacacgcctgtacctgcggatcctccgaccaccttcaaccagtcaaagctgaactctttcatcacgcaatacagcaccggacaggtcagcgtggaaattgaatgggagctgcagaaggaaaacagcaagcgctggaaccccgagatccagtacacctccaactactacaaatctacaagtgtggactttgctgttaatacagaaggcgtgtactctgaaccccgccccattggcacccgttacctcacccgtaatctgtaa

SEQ ID NO: 121 - DNA, 2213 bp, Adeno-associated virus 8
atggctgccgatggttatcttccagattggctcgaggacaacctctctgagggcattcgcgagtggtgggcgctgaaacctggagccccgaagcccaaagccaaccagcaaaagcaggacgacggccggggtctggtgcttcctggctacaagtacctcggacccttcaacggactcgacaagggggagcccgtcaacgcggcggacgcagcggccctcgagcacgacaaggcctacgaccagcagctgcaggcgggtgacaatccgtacctgcggtataaccacgccgacgccgagtttcaggagcgtctgcaagaagatacgtcttttgggggcaacctcgggcgagcagtcttccaggccaagaagcgggttctcgaacctctcggtctggttgaggaaggcgctaagacggctcctggaaagaagagaccggtagagccatcaccccagcgttctccagactcctctacgggcatcggcaagaaaggccaacagcccgccagaaaaagactcaattttggtcagactggcgactcagagtcagttccagaccctcaacctctcggagaacctccagcagcgccctctggtgtgggacctaatacaatggctgcaggcggtggcgcaccaatggcagacaataacgaaggcgccgacggagtgggtagttcctcgggaaattggcattgcgattccacatggctgggcgacagagtcatcaccaccagcacccgaacctgggccctgcccacctacaacaaccacctctacaagcaaatctccaacgggacatcgggaggagccaccaacgacaacacctacttcggctacagcaccccctgggggtattttgactttaacagattccactgccacttttcaccacgtgactggcagcgactcatcaacaacaactggggattccggcccaagagactcagcttcaagctcttcaacatccaggtcaaggaggtcacgcagaatgaaggcaccaagaccatcgccaataacctcaccagcaccatccaggtgtttacggactcggagtaccagctgccgtacgttctcggctctgcccaccagggctgcctgcctccgttcccggcggacgtgttcatgattccccagtacggctacctaacactcaacaacggtagtcaggccgtgggacgctcctccttctactgcctggaatactttccttcgcagatgctgagaaccggcaacaacttccagtttacttacaccttcgaggacgtgcctttccacagcagctacgcccacagccagagcttggaccggctgatgaatcctctgattgaccagtacctgtactacttgtctcggactcaaacaacaggaggcacggcaaatacgcagactctgggcttcagccaaggtgggcctaatacaatggccaatcaggcaaagaactggctgccaggaccctgttaccgccaacaacgcgtctcaacgacaaccgggcaaaacaacaatagcaactttgcctggactgctgggaccaaataccatctgaatggaagaaattcattggctaatcctggcatcgctatggcaacacacaaagacgacgaggagcgtttttttcccagtaacgggatcctgatttttggcaaacaaaatgctgccagagacaatgcggattacagcgatgtcatgctcaccagcgaggaagaaatcaaaaccactaaccctgtggctacagaggaatacggtatcgtggcagataacttgcagcagcaaaacacggctcctcaaattggaactgtcaacagccagggggccttacccggtatggtctggcagaaccgggacgtgtacctgcagggtcccatctgggccaagattcctcacacggacggcaacttccacccgtctccgctgatgggcggctttggcctgaaacatcctccgcctcagatcctgatcaagaacacgcctgtacctgcggatcctccgaccaccttcaaccagtcaaagctgaactctttcatcacgcaatacagcaccggacaggtcagcgtggaaattgaatgggagctgcagaaggaaaacagcaagcgctggaaccccgagatccagtacacctccaactactacaaatctacaagtgtggactttgctgtaatacagaaggcgtgtactctgaaccccgccccattggcacccgttacctcacccgtaatctg

SEQ ID NO: 122 - DNA, 4393 bp, Adeno-associated virus 8
cagagagggagtggccaactccatcactaggggtagcgcgaagcgcctcccacgctgccgcgtcagcgctgacgtaaattacgtcataggggagtggtcctgtattagctgtcacgtgagtgcttttgcggcattttgcgacaccacgtggccatttgaggtatatatggccgagtgagcgagcaggatctccattttgaccgcgaaatttgaacgagcagcagccatgccgggcttctacgagatcgtgatcaaggtgccgagcgacctggacgagcacctgccgggcatttctgactcgtttgtgaactgggtggccgagaaggaatgggagctgcccccggattctgacatggatcggaatctgatcgagcaggcacccctgaccgtggccgagaagctgcagcgcgacttcctggtccaatggcgccgcgtgagtaaggccccggaggccctcttctttgttcagttcgagaagggcgagagctactttcacctgcacgttctggtcgagaccacgggggtcaagtccatggtgctaggccgcttcctgagtcagattcgggaaaagcttggtccagaccatctacccgcggggtcgagccccaccttgcccaactggttcgcggtgaccaaagacgcggtaatggcgccggcgggggggaacaaggtggtggacgagtgctacatccccaactacctcctgcccaagactcagcccgagctgcagtgggcgtggactaacatggaggagtatataagcgcgtgcttgaacctggccgagcgcaaacggctcgtggcgcagcacctgacccacgtcagccagacgcaggagcagaacaaggagaatctgaaccccaattctgacgcgcccgtgatcaggtcaaaaacctccgcgcgctatatggagctggtcgggtggctggtggaccggggcatcacctccgagaagcagtggatccaggaggaccaggcctcgtacatctccttcaacgccgcctccaactcgcggtcccagatcaaggccgcgctggacaatgccggcaagatcatggcgctgaccaaatccgcgcccgactacctggtggggccctcgctgcccgcggacattacccagaaccgcatctaccgcatcctcgctctcaacggctacgaccctgcctacgccggctccgtctttctcggctgggctcagaaaaagttcgggaaacgcaacaccatctggctgtttggacccgccaccaccggcaagaccaacattgcggaagccatcgcccacgccgtgcccttctacggctgcgtcaactggaccaatgagaactttcccttcaatgattgcgtcgacaagatggtgatctggtgggaggagggcaagatgacggccaaggtcgtggagtccgccaaggccattctcggcggcagcaaggtgcgcgtggaccaaaagtgcaagtcgtccgcccagatcgaccccacccccgtgatcgtcacctccaacaccaacatgtgcgccgtgattgacgggaacagcaccaccttcgagcaccagcagcctctccaggaccggatgtttaagttcgaactcacccgccgtctggagcacgactttggcaaggtgacaaagcaggaagtcaaagagttcttccgctgggccagtgatcacgtgaccgaggtggcgcatgagttttacgtcagaaagggcggagccagcaaaagacccgcccccgatgacgcggataaaagcgagcccaagcgggcctgcccctcagtcgcggatccatcgacgtcagacgcggaaggagctccggtggactttgccgacaggtaccaaaacaaatgttctcgtcacgcgggcatgcttcagatgctgtttccctgcaaaacgtgcgagagaatgaatcagaatttcaacatttgcttcacacacggggtcagagactgctcagagtgtttccccggcgtgtcagaatctcaaccggtcgtcagaaagaggacgtatcggaaactctgtgcgattcatcatctgctggggcgggctcccgagattgcttgctcggcctgcgatctggtcaacgtggacctggatgactgtgtttctgagcaataaatgacttaaaccaggtatggctgccgatggttatcttccagattggctcgaggacaacctctctgagggcattcgcgagtggtgggcgctgaaacctggagccccgaagcccaaagccaaccagcaaaagcaggacgacggccggggtctggtgcttcctggctacaagtacctcggacccttcaacggactcgacaagggggagcccgtcaacgcggcggacgcagcggccctcgagcacgacaaggcctacgaccagcagctgcaggcgggtgacaatccgtacctgcggtataaccacgccgacgccgagtttcaggagcgtctgcaagaagatacgtcttttgggggcaacctcgggcgagcagtcttccaggccaagaagcgggttctcgaacctctcggtctggttgaggaaggcgctaagacggctcctggaaagaagagaccggtagagccatcaccccagcgttctccagactcctctacgggcatcggcaagaaaggccaacagcccgccagaaaaagactcaattttggtcagactggcgactcagagtcagttccagaccctcaacctctcggagaacctccagcagcgccctctggtgtgggacctaatacaatggctgcaggcggtggcgcaccaatggcagacaataacgaaggcgccgacggagtgggtagttcctcgggaaattggcattgcgattccacatggctgggcgacagagtcatcaccaccagcacccgaacctgggccctgcccacctacaacaaccacctctacaagcaaatctccaacgggacatcgggaggagccaccaacgacaacacctacttcggctacagcaccccctgggggtattttgactttaacagattccactgccacttttcaccacgtgactggcagcgactcatcaacaacaactggggattccggcccaagagactcagcttcaagctcttcaacatccaggtcaaggaggtcacgcagaatgaaggcaccaagaccatcgccaataacctcaccagcaccatccaggtgtttacggactcggagtaccagctgccgtacgttctcggctctgcccaccagggctgcctgcctccgttcccggcggacgtgttcatgattccccagtacggctacctaacactcaacaacggtagtcaggccgtgggacgctcctccttctactgcctggaatactttccttcgcagatgctgagaaccggcaacaacttccagtttacttacaccttcgaggacgtgcctttccacagcagctacgcccacagccagagcttggaccggctgatgaatcctctgattgaccagtacctgtactacttgtctcggactcaaacaacaggaggcacggcaaatacgcagactctgggcttcagccaaggtgggcctaatacaatggccaatcaggcaaagaactggctgccaggaccctgttaccgccaacaacgcgtctcaacgacaaccgggcaaaacaacaatagcaactttgcctggactgctgggaccaaataccatctgaatggaagaaattcattggctaatcctggcatcgctatggcaacacacaaagacgacgaggagcgtttttttcccagtaacgggatcctgatttttggcaaacaaaatgctgccagagacaatgcggattacagcgatgtcatgctcaccagcgaggaagaaatcaaaaccactaaccctgtggctacagaggaatacggtatcgtggcagataacttgcagcagcaaaacacggctcctcaaattggaactgtcaacagccagggggccttacccggtatggtctggcagaaccgggacgtgtacctgcagggtcccatctgggccaagattcctcacacggacggcaacttccacccgtctccgctgatgggcggctttggcctgaaacatcctccgcctcagatcctgatcaagaacacgcctgtacctgcggatcctccgaccaccttcaaccagtcaaagctgaactctttcatcacgcaatacagcaccggacaggtcagcgtggaaattgaatgggagctgcagaaggaaaacagcaagcgctggaaccccgagatccagtacacctccaactactacaaatctacaagtgtggactttgctgttaatacagaaggcgtgtactctgaaccccgccccattggcacccgttacctcacccgtaatctgtaattgcctgttaatcaataaaccggttgattcgtttcagttgaactttggtctctgcg

SEQ ID NO: 123 - protein, 738 aa, Adeno-associated virus 8; identical to SEQ ID NO: 114

SEQ ID NO: 124 - protein, 737 aa, Adeno-associated virus 8
MAADGYLPDWLEDNLSEGIREWWALKPGAPKPKANQQKQDDGRGLVLPGYKYLGPFNGLDKGEPVNAADAAALEHDKAYDQQLQAGDNPYLRYNHADAEFQERLQEDTSFGGNLGRAVFQAKKRVLEPLGLVEEGAKTAPGKKRPVEPSPQRSPDSSTGIGKKGQQPARKRLNFGQTGDSESVPDPQPLGEPPAAPSGVGPNTMAAGGGAPMADNNEGADGVGSSSGNWHCDSTWLGDRVITTSTRTWALPTYNNHLYKQISNGTSGGATNDNTYFGYSTPWGYFDFNRFHCHFSPRDWQRLINNNWGFRPKRLSFKLFNIQVKEVTQNEGTKTIANNLTSTIQVFTDSEYQLPYVLGSAHQGCLPPFPADVFMIPQYGYLTLNNGSQAVGRSSFYCLEYFPSQMLRTGNNFQFTYTFEDVPFHSSYAHSQSLDRLMNPLIDQYLYYLSRTQTTGGTANTQTLGFSQGGPNTMANQAKNWLPGPCYRQQRVSTTTGQNNNSNFAWTAGTKYHLNGRNSLANPGIAMATHKDDEERFFPSNGILIFGKQNAARDNADYSDVMLTSEEEIKTTNPVATEEYGIVADNLQQQNTAPQIGTVNSQGALPGMVWQNRDVYLQGPIWAKIPHTDGNFHPSPLMGGFGLKHPPPQILIKNTPVPADPPTTFNQSKLNSFITQYSTGQVSVEIEWELQKENSKRWNPEIQYTSNYYKSTSVDFAVIQKACTLNPAPLAPVTSPVI

SEQ ID NO: 125 - DNA, 2217 bp, Artificial Sequence; identical to SEQ ID NO: 120
  source: /note="Description of Artificial Sequence: Synthetic polynucleotide"

SEQ ID NO: 126 - DNA, 2214 bp, Artificial Sequence
  source: /note="Description of Artificial Sequence: Synthetic polynucleotide"
atggctgccgatggttatcttccagattggctcgaggacaacctctctgagggcattcgcgagtggtgggcgctgaaacctggagccccgaagcccaaagccaaccagcaaaagcaggacgacggccggggtctggtgcttcctggctacaagtacctcggacccttcaacggactcgacaagggggagcccgtcaacgcggcggacgcagcggccctcgagcacgacaaggcctacgaccagcagctgcaggcgggtgacaatccgtacctgcggtataaccacgccgacgccgagtttcaggagcgtctgcaagaagatacgtcttttgggggcaacctcgggcgagcagtcttccaggccaagaagcgggttctcgaacctctcggtctggttgaggaaggcgctaagacggctcctggaaagaagagaccggtagagccatcaccccagcgttctccagactcctctacgggcatcggcaagaaaggccaacagcccgccagaaaaagactcaattttggtcagactggcgactcagagtcagttccagaccctcaacctctcggagaacctccagcagcgccctctggtgtgggacctaatacaatggctgcaggcggtggcgcaccaatggcagacaataacgaaggcgccgacggagtgggtagttcctcgggaaattggcattgcgattccacatggctgggcgacagagtcatcaccaccagcacccgaacctgggccctgcccacctacaacaaccacctctacaagcaaatctccaacgggacatcgggaggagccaccaacgacaacacctacttcggctacagcaccccctgggggtattttgactttaacagattccactgccacttttcaccacgtgactggcagcgactcatcaacaacaactggggattccggcccaagagactcagcttcaagctcttcaacatccaggtcaaggaggtcacgcagaatgaaggcaccaagaccatcgccaataacctcaccagcaccatccaggtgtttacggactcggagtaccagctgccgtacgttctcggctctgcccaccagggctgcctgcctccgttcccggcggacgtgttcatgattccccagtacggctacctaacactcaacaacggtagtcaggccgtgggacgctcctccttctactgcctggaatactttccttcgcagatgctgagaaccggcaacaacttccagtttacttacaccttcgaggacgtgcctttccacagcagctacgcccacagccagagcttggaccggctgatgaatcctctgattgaccagtacctgtactacttgtctcggactcaaacaacaggaggcacggcaaatacgcagactctgggcttcagccaaggtgggcctaatacaatggccaatcaggcaaagaactggctgccaggaccctgttaccgccaacaacgcgtctcaacgacaaccgggcaaaacaacaatagcaactttgcctggactgctgggaccaaataccatctgaatggaagaaattcattggctaatcctggcatcgctatggcaacacacaaagacgacgaggagcgtttttttcccagtaacgggatcctgatttttggcaaacaaaatgctgccagagacaatgcggattacagcgatgtcatgctcaccagcgaggaagaaatcaaaaccactaaccctgtggctacagaggaatacggtatcgtggcagataacttgcctgagcggacggcgatgagtcttccgggaactgtcaacagccagggggccttacccggtatggtctggcagaaccgggacgtgtacctgcagggtcccatctgggccaagattcctcacacggacggcaacttccacccgtctccgctgatgggcggctttggcctgaaacatcctccgcctcagatcctgatcaagaacacgcctgtacctgcggatcctccgaccaccttcaaccagtcaaagctgaactctttcatcacgcaatacagcaccggacaggtcagcgtggaaattgaatgggagctgcagaaggaaaacagcaagcgctggaaccccgagatccagtacacctccaactactacaaatctacaagtgtggactttgctgttaatacagaaggcgtgtactctgaaccccgccccattggcacccgttacctcacccgtaatctg

SEQ ID NO: 127 - protein, 738 aa, Artificial Sequence
  source: /note="Description of Artificial Sequence: Synthetic polypeptide"
MAADGYLPDWLEDNLSEGIREWWALKPGAPKPKANQQKQDDGRGLVLPGYKYLGPFNGLDKGEPVNAADAAALEHDKAYDQQLQAGDNPYLRYNHADAEFQERLQEDTSFGGNLGRAVFQAKKRVLEPLGLVEEGAKTAPGKKRPVEPSPQRSPDSSTGIGKKGQQPARKRLNFGQTGDSESVPDPQPLGEPPAAPSGVGPNTMAAGGGAPMADNNEGADGVGSSSGNWHCDSTWLGDRVITTSTRTWALPTYNNHLYKQISNGTSGGATNDNTYFGYSTPWGYFDFNRFHCHFSPRDWQRLINNNWGFRPKRLSFKLFNIQVKEVTQNEGTKTIANNLTSTIQVFTDSEYQLPYVLGSAHQGCLPPFPADVFMIPQYGYLTLNNGSQAVGRSSFYCLEYFPSQMLRTGNNFQFTYTFEDVPFHSSYAHSQSLDRLMNPLIDQYLYYLSRTQTTGGTANTQTLGFSQGGPNTMANQAKNWLPGPCYRQQRVSTTTGQNNNSNFAWTAGTKYHLNGRNSLANPGIAMATHKDDEERFFPSNGILIFGKQNAARDNADYSDVMLTSEEEIKTTNPVATEEYGIVADNLPERTAMSLPGTVNSQGALPGMVWQNRDVYLQGPIWAKIPHTDGNFHPSPLMGGFGLKHPPPQILIKNTPVPADPPTTFNQSKLNSFITQYSTGQVSVEIEWELQKENSKRWNPEIQYTSNYYKSTSVDFAVNTEGVYSEPRPIGTRYLTRNL

SEQ ID NO: 128 - DNA, 2214 bp, Artificial Sequence
  source: /note="Description of Artificial Sequence: Synthetic polynucleotide"
atggctgccgatggttatcttccagattggctcgaggacaacctctctgagggcattcgcgagtggtgggcgctgaaacctggagccccgaagcccaaagccaaccagcaaaagcaggacgacggccggggtctggtgcttcctggctacaagtacctcggacccttcaacggactcgacaagggggagcccgtcaacgcggcggacgcagcggccctcgagcacgacaaggcctacgaccagcagctgcaggcgggtgacaatccgtacctgcggtataaccacgccgacgccgagtttcaggagcgtctgcaagaagatacgtcttttgggggcaacctcgggcgagcagtcttccaggccaagaagcgggttctcgaacctctcggtctggttgaggaaggcgctaagacggctcctggaaagaagagaccggtagagccatcaccccagcgttctccagactcctctacgggcatcggcaagaaaggccaacagcccgccagaaaaagactcaattttggtcagactggcgactcagagtcagttccagaccctcaacctctcggagaacctccagcagcgccctctggtgtgggacctaatacaatggctgcaggcggtggcgcaccaatggcagacaataacgaaggcgccgacggagtgggtagttcctcgggaaattggcattgcgattccacatggctgggcgacagagtcatcaccaccagcacccgaacctgggccctgcccacctacaacaaccacctctacaagcaaatctccaacgggacatcgggaggagccaccaacgacaacacctacttcggctacagcaccccctgggggtattttgactttaacagattccactgccacttttcaccacgtgactggcagcgactcatcaacaacaactggggattccggcccaagagactcagcttcaagctcttcaacatccaggtcaaggaggtcacgcagaatgaaggcaccaagaccatcgccaataacctcaccagcaccatccaggtgtttacggactcggagtaccagctgccgtacgttctcggctctgcccaccagggctgcctgcctccgttcccggcggacgtgttcatgattccccagtacggctacctaacactcaacaacggtagtcaggccgtgggacgctcctccttctactgcctggaatactttccttcgcagatgctgagaaccggcaacaacttccagtttacttacaccttcgaggacgtgcctttccacagcagctacgcccacagccagagcttggaccggctgatgaatcctctgattgaccagtacctgtactacttgtctcggactcaaacaacaggaggcacggcaaatacgcagactctgggcttcagccaaggtgggcctaatacaatggccaatcaggcaaagaactggctgccaggaccctgttaccgccaacaacgcgtctcaacgacaaccgggcaaaacaacaatagcaactttgcctggactgctgggaccaaataccatctgaatggaagaaattcattggctaatcctggcatcgctatggcaacacacaaagacgacgaggagcgtttttttcccagtaacgggatcctgatttttggcaaacaaaatgctgccagagacaatgcggattacagcgatgtcatgctcaccagcgaggaagaaatcaaaaccactaaccctgtggctacagaggaatacggtatcgtggcagataacttgagttttagtcgtgcggttctttgtgatggaactgtcaacagccagggggccttacccggtatggtctggcagaaccgggacgtgtacctgcagggtcccatctgggccaagattcctcacacggacggcaacttccacccgtctccgctgatgggcggctttggcctgaaacatcctccgcctcagatcctgatcaagaacacgcctgtacctgcggatcctccgaccaccttcaaccagtcaaagctgaactctttcatcacgcaatacagcaccggacaggtcagcgtggaaattgaatgggagctgcagaaggaaaacagcaagcgctggaaccccgagatccagtacacctccaactactacaaatctacaagtgtggactttgctgttaatacagaaggcgtgtactctgaaccccgccccattggcacccgttacctcacccgtaatctg

SEQ ID NO: 129 - protein, 738 aa, Artificial Sequence
  source: /note="Description of Artificial Sequence: Synthetic polypeptide"
MAADGYLPDWLEDNLSEGIREWWALKPGAPKPKANQQKQDDGRGLVLPGYKYLGPFNGLDKGEPVNAADAAALEHDKAYDQQLQAGDNPYLRYNHADAEFQERLQEDTSFGGNLGRAVFQAKKRVLEPLGLVEEGAKTAPGKKRPVEPSPQRSPDSSTGIGKKGQQPARKRLNFGQTGDSESVPDPQPLGEPPAAPSGVGPNTMAAGGGAPMADNNEGADGVGSSSGNWHCDSTWLGDRVITTSTRTWALPTYNNHLYKQISNGTSGGATNDNTYFGYSTPWGYFDFNRFHCHFSPRDWQRLINNNWGFRPKRLSFKLFNIQVKEVTQNEGTKTIANNLTSTIQVFTDSEYQLPYVLGSAHQGCLPPFPADVFMIPQYGYLTLNNGSQAVGRSSFYCLEYFPSQMLRTGNNFQFTYTFEDVPFHSSYAHSQSLDRLMNPLIDQYLYYLSRTQTTGGTANTQTLGFSQGGPNTMANQAKNWLPGPCYRQQRVSTTTGQNNNSNFAWTAGTKYHLNGRNSLANPGIAMATHKDDEERFFPSNGILIFGKQNAARDNADYSDVMLTSEEEIKTTNPVATEEYGIVADNLSFSRAVLCDGTVNSQGALPGMVWQNRDVYLQGPIWAKIPHTDGNFHPSPLMGGFGLKHPPPQILIKNTPVPADPPTTFNQSKLNSFITQYSTGQVSVEIEWELQKENSKRWNPEIQYTSNYYKSTSVDFAVNTEGVYSEPRPIGTRYLTRNL

SEQ ID NO: 130 - DNA, 4385 bp, Adeno-associated virus 9
cagagagggagtggccaactccatcactaggggtaatcgcgaagcgcctcccacgctgccgcgtcagcgctgacgtagattacgtcataggggagtggtcctgtattagctgtcacgtgagtgcttttgcgacattttgcgacaccacatggccatttgaggtatatatggccgagtgagcgagcaggatctccattttgaccgcgaaatttgaacgagcagcagccatgccgggcttctacgagattgtgatcaaggtgccgagcgacctggacgagcacctgccgggcatttctgactcttttgtgaactgggtggccgagaaggaatgggagctgcccccggattctgacatggatcggaatctgatcgagcaggcacccctgaccgtggccgagaagctgcagcgcgacttcctggtccaatggcgccgcgtgagtaaggccccggaggccctcttctttgttcagttcgagaagggcgagagctactttcacctgcacgttctggtcgagaccacgggggtcaagtccatggtgctaggccgcttcctgagtcagattcgggagaagctggtccagaccatctaccgcgggatcgagccgaccctgcccaactggttcgcggtgaccaagacgcgtaatggcgccggcggggggaacaaggtggtggacgagtgctacatccccaactacctcctgcccaagactcagcccgagctgcagtgggcgtggactaacatggaggagtatataagcgcgtgcttgaacctggccgagcgcaaacggctcgtggcgcagcacctgacccacgtcagccagacgcaggagcagaacaaggagaatctgaaccccaattctgacgcgcccgtgatcaggtcaaaaacctccgcgcgctacatggagctggtcgggtggctggtggaccggggcatcacctccgagaagcagtggatccaggaggaccaggcctcgtacatctccttcaacgccgcctccaactcgcggtcccagatcaaggccgcgctggacaatgccggcaagatcatggcgctgaccaaatccgcgcccgactacctggtaggcccttcacttccggtggacattacgcagaaccgcatctaccgcatcctgcagctcaacggctacgaccctgcctacgccggctccgtctttctcggctgggcacaaaagaagttcgggaaacgcaacaccatctggctgtttgggccggccaccacgggaaagaccaacatcgcagaagccattgcccacgccgtgcccttctacggctgcgtcaactggaccaatgagaactttcccttcaacgattgcgtcgacaagatggtgatctggtgggaggagggcaagatgacggccaaggtcgtggagtccgccaaggccattctcggcggcagcaaggtgcgcgtggaccaaaagtgcaagtcgtccgcccagatcgaccccactcccgtgatcgtcacctccaacaccaacatgtgcgccgtgattgacgggaacagcaccaccttcgagcaccagcagcctctccaggaccggatgtttaagttcgaactcacccgccgtctggagcacgactttggcaaggtgacaaagcaggaagtcaaagagttcttccgctgggccagtgatcacgtgaccgaggtggcgcatgagttttacgtcagaaagggcggagccagcaaaagacccgcccccgatgacgcggataaaagcgagcccaagcgggcctgcccctcagtcgcggatccatcgacgtcagacgcggaaggagctccggtggactttgccgacaggtaccaaaacaaatgttctcgtcacgcgggcatgcttcagatgctgcttccctgcaaaacgtgcgagagaatgaatcagaatttcaacatttgcttcacacacggggtcagagactgctcagagtgtttccccggcgtgtcagaatctcaaccggtcgtcagaaagaggacgtatcggaaactctgtgcgattcatcatctgctggggcgggctcccgagattgcttgctcggcctgcgatctggtcaacgtggacctggatgactgtgtttctgagcaataaatgacttaaaccaggtatggctgccgatggttatcttccagattggctcgaggacaacctctctgagggcattcgcgagtggtgggcgctgaaacctggagccccgaagcccaaagccaaccagcaaaagcaggacgacggccggggtctggtgcttcctggctacaagtacctcggacccttcaacggactcgacaagggggagcccgtcaacgcggcggacgcagcggccctcgagcacggcaaggcctacgaccagcagctgcaggcgggtgacaatccgtacctgcggtataaccacgccgacgccgagtttcaggagcgtctgcaagaagatacgtcttttgggggcaacctcgggcgagcagtcttccaggccaagaagcgggttctcgaacctctcggtctggttgaggaaggcgctaagacggctcctggaaagaagagaccggtagagccatcaccccagcgttctccagactcctctacgggcatcggcaagaaaggccaacagcccgccagaaaaagactcaattttggtcagactggcgactcagagtcagttccagaccctcaacctctcggagaacctccagcagcgccctctggtgtgggacctaatacaatggctgcaggcggtggcgcaccaatggcagacaataacgaaggcgccgacggagtgggtaattcctcgggaaattggcattgcgattccacatggctgggggacagagtcatcaccaccagcacccgaacctgggcattgcccacctacaacaaccacctctacaagcaaatctccaatggaacatcgggaggaagcaccaacgacaacacctactttggctacagcaccccctgggggtattttgacttcaacagattccactgccacttctcaccacgtgactggcagcgactcatcaacaacaactggggattccggccaaagagactcaacttcaagctgttcaacatccaggtcaaggaggttacgacgaacgaaggcaccaagaccatcgccaataaccttaccagcaccgtccaggtctttacggactcggagtaccagctaccgtacgtcctaggctctgcccaccaaggatgcctgccaccgtttcctgcagacgtcttcatggttcctcagtacggctacctgacgctcaacaatggaagtcaagcgttaggacgttcttctttctactgtctggaatacttcccttctcagatgctgagaaccggcaacaactttcagttcagctacactttcgaggacgtgcctttccacagcagctacgcacacagccagagtctagatcgactgatgaaccccctcatcgaccagtacctatactacctggtcagaacacagacaactggaactgggggaactcaaactttggcattcagccaagcaggccctagctcaatggccaatcaggctagaaactgggtacccgggccttgctaccgtcagcagcgcgtctccacaaccaccaaccaaaataacaacagcaactttgcgtggacgggagctgctaaattcaagctgaacgggagagactcgctaatgaatcctggcgtggctatggcatcgcacaaagacgacgaggaccgcttctttccatcaagtggcgttctcatatttggcaagcaaggagccgggaacgatggagtcgactacagccaggtgctgattacagatgaggaagaaattaaagccaccaaccctgtagccacagaggaatacggagcagtggccatcaacaaccaggccgctaacacgcaggcgcaaactggacttgtgcataaccagggagttattcctggtatggtctggcagaaccgggacgtgtacctgcagggccctatttgggctaaaatacctcacacagatggcaactttcacccgtctcctctgatgggtggatttggactgaaacacccacctccacagattctaattaaaaatacaccagtgccggcagatcctcctcttaccttcaatcaagccaagctgaactctttcatcacgcagtacagcacgggacaagtcagcgtggaaatcgagtgggagctgcagaaagaaaacagcaagcgctggaatccagagatccagtatacttcaaactactacaaatctacaaatgtggactttgctgtcaataccaaaggtgtttactctgagcctcgccccattggtactcgttacctcacccgtaatttgtaattgcctgttaatcaataaaccggttaattcgtttcagttgaactttggtctctgcg

SEQ ID NO: 131 - DNA, 4382 bp, Adeno-associated virus 9
cagagagggagtggccaactccatcactaggggtaatcgcgaagcgcctcccacgctgccgcgtcagcgctgacgtagattacgtcataggggagtggtcctgtattagctgtcacgtgagtgcttttgcgacattttgcgacaccacatggccatttgaggtatatatggccgagtgagcgagcaggatctccattttgaccgcgaaatttgaacgagcagcagccatgccgggcttctacgagattgtgatcaaggtgccgagcgacctggacgagcacctgccgggcatttctgactcttttgtgaactgggtggccgagaaggaatgggagctgcccccggattctgacatggatcggaatctgatcgagcaggcacccctgaccgtggccgagaagctgtagcgcgacttcctggtccaatggcgccgcgtgagtaaggccccggaggccctcttctttgttcagttcgagaagggcgagagctactttcacctgcacgttctggtcgagaccacgggggtcaagtccatggtgctaggccgcttcctgagtcagattcgggagaagctggtccagaccatctaccgcgggatcgagccgaccctgcccaactggttcgcggtgaccaagacgcgtaatggcgccggcggggggaacaaggtggtggacgagtgctacatccccaactacctcctgcccaagactcagcccgagctgcagtgggcgtggactaacatggaggagtatataagcgcgtgcttgaacctggccgagcgcaaacggctcgtggcgcagcacctgacccacgtcagccagacgcaggagcagaacaaggagaatctgaaccccaattctgacgcgcccgtgatcaggtcaaaaacctccgcgcgctacatggagctggtcgggtggctggtggaccggggcatcacctccgagaagcagtggatccaggaggaccaggcctcgtacatctccttcaacgccgcctccaactcgcggtcccagatcaaggccgcgctggacaatgccggcaagatcatggcgctgaccaaatccgcgcccgactacctggtaggcccttcacttccggtggacattacgcagaaccgcatctaccgcatcctgcagctcaacggctacgaccctgcctacgccggctccgtctttctcggctgggcacaaaagaagttcgggaaacgcaacaccatctggctgtttgggccggccaccacgggaaagaccaacatcgcagaagccattgcccacgccgtgcccttctacggctgcgtcaactggaccaatgagaactttcccttcaacgattgcgtcgacaagatggtgatctggtgggaggagggcaagatgacggccaaggtcgtggagtccgccaaggccattctcggcggcagcaaggtgcgcgtggaccaaaagtgcaagtcgtccgcccagatcgaccccactcccgtgatcgtcacctccaacaccaacatgtgcgccgtgattgacgggaacagcaccaccttcgagcaccagcagcctctccaggaccggatgtttaagttcgaactcacccgccgtctggagcacgactttggcaaggtgacaaagcaggaagtcaaagagttcttccgctgggccagtgatcacgtgaccgaggtggcgcatgagttttacgtcagaaagggcggagccagcaaaagacccgcccccgatgacgcggataaaagcgagcccaagcgggcctgcccctcagtcgcggatccatcgacgtcagacgcggaaggagctccggtggactttgccgacaggtaccaaaacaaatgttctcgtcacgcgggcatgcttcagatgctgcttccctgcaaaacgtgcgagagaatgaatcagaatttcaacatttgcttcacacacggggtcagagactgctcagagtgtttccccggcgtgtcagaatctcaaccggtcgtcagaaagaggacgtatcggaaactctgtgcgattcatcatctgctggggcgggctcccgagattgcttgctcggcctgcgatctggtcaacgtggacctggatgactgtgtttctgagcaataaatgacttaaaccaggtatggctgccgatggttatcttccagattggctcgaggacaacctctctgagggcattcgcgagtggtgggacctgaaacctggagccccgaaacccaaagccaaccagcaaaagcaggacgacggccggggtctggtgcttcctggctacaagtacctcggacccttcaacggactcgacaagggggagcccgtcaacgcggcggacgcagcggccctcgagcacgacaaggcctacgaccagcagctcaaagcgggtgacaatccgtacctgcggtataaccacgccgacgccgagtttcaggagcgtctgcaagaagatacgtcttttgggggcaacctcgggcgagcagtcttccaggccaagaagcgggttctcgaacctctcggtctggttgaggaaggcgctaagacggctcctggaaagaagagaccggtagagcagtcaccccaagaaccagactcatcctcgggcatcggcaaatcaggccagcagcccgctaaaaagagactcaattttggtcagactggcgactcagagtcagtccccgacccacaacctctcggagaacctccagaagccccctcaggtctgggacctaatacaatggcttcaggcggtggcgctccaatggcagacaataacgaaggcgccgacggagtgggtaattcctcgggaaattggcattgcgattccacatggctgggggacagagtcatcaccaccagcacccgaacctgggcattgcccacctacaacaaccacctctacaagcaaatctccaatggaacatcgggaggaagcaccaacgacaacacctactttggctacagcaccccctgggggtattttgacttcaacagattccactgccacttctcaccacgtgactggcagcgactcatcaacaacaactggggattccggccaaagagactcaacttcaagctgttcaacatccaggtcaaggaggttacgacgaacgaaggcaccaagaccatcgccaataaccttaccagcaccgtccaggtctttacggactcggagtaccagctaccgtacgtcctaggctctgcccaccaaggatgcctgccaccgtttcctgcagacgtcttcatggttcctcagtacggctacctgacgctcaacaatggaagtcaagcgttaggacgttcttctttctactgtctggaatacttcccttctcagatgctgagaaccggcaacaactttcagttcagctacactttcgaggacgtgcctttccacagcagctacgcacacagccagagtctagatcgactgatgaaccccctcatcgaccagtacctatactacctggtcagaacacagacaactggaactgggggaactcaaactttggcattcagccaagcaggccctagctcaatggccaatcaggctagaaactgggtacccgggccttgctaccgtcagcagcgcgtctccacaaccaccaaccaaaataacaacagcaactttgcgtggacgggagctgctaaattcaagctgaacgggagagactcgctaatgaatcctggcgtggctatggcatcgcacaaagacgacgaggaccgcttctttccatcaagtggcgttctcatatttggcaagcaaggagccgggaacgatggagtcgactacagccaggtgctgattacagatgaggaagaaattaaagccaccaaccctgtagccacagaggaatacggagcagtggccatcaacaaccaggccgctaacacgcaggcgcaaactggacttgtgcataaccagggagttattcctggtatggtctggcagaaccgggacgtgtacctgcagggccctatttgggctaaaatacctcacacagatggcaactttcacccgtctcctctgatgggtggatttggactgaaacacccacctccacagattctaattaaaaatacaccagtgccggcagatcctcctcttaccttcaatcaagccaagctgaactctttcatcacgcagtacagcacgggacaagtcagcgtggaaatcgagtgggagctgcagaaagaaaacagcaagcgctggaatccagagatccagtatacttcaaactactacaaatctacaaatgtggactttgctgtcaataccgaaggtgtttactctgagcctcgccccattggtactcgttacctcacccgtaatttgtaattgcctgttaatcaataaaccggttaattcgtttcagttgaactttggtctctgcg

SEQ ID NO: 132 - protein, 736 aa, Adeno-associated virus 9
MAADGYLPDWLEDNLSEGIREWWALKPGAPQPKANQQHQDNARGLVLPGYKYLGPGNGLDKGEPVNAADAAALEHDKAYDQQLKAGDNPYLKYNHADAEFQERLKEDTSFGGNLGRAVFQAKKRLLEPLGLVEEAAKTAPGKKRPVEQSPQEPDSSAGIGKSGAQPAKKRLNFGQTGDTESVPDPQPIGEPPAAPSGVGSLTMASGGGAPVADNNEGADGVGSSSGNWHCDSQWLGDRVITTSTRTWALPTYNNHLYKQISNSTSGGSSNDNAYFGYSTPWGYFDFNRFHCHFSPRDWQRLINNNWGFRPKRLNFKLFNIQVKEVTDNNGVKTIANNLTSTVQVFTDSDYQLPYVLGSAHEGCLPPFPADVFMIPQYGYLTLNDGSQAVGRSSFYCLEYFPSQMLRTGNNFQFSYEFENVPFHSSYAHSQSLDRLMNPLIDQYLYYLSKTINGSGQNQQTLKFSVAGPSNMAVQGRNYIPGPSYRQQRVSTTVTQNNNSEFAWPGASSWALNGRNSLMNPGPAMASHKEGEDRFFPLSGSLIFGKQGTGRDNVDADKVMITNEEEIKTTNPVATESYGQVATNHQSAQAQAQTGWVQNQGILPGMVWQDRDVYLQGPIWAKIPHTDGNFHPSPLMGGFGMKHPPPQILIKNTPVPADPPTAFNKDKLNSFITQYSTGQVSVEIEWELQKENSKRWNPEIQYTSNYYKSNNVEFAVNTEGVYSEPRPIGTRYLTRNL

SEQ ID NO: 133 - protein, 736 aa, Adeno-associated virus 9
MAADGYLPDWLEDNLSEGIREWWDLKPGAPKPKANQQKQDDGRGLVLPGYKYLGPFNGLDKGEPVNAADAAALEHDKAYDQQLKAGDNPYLRYNHADAEFQERLQEDTSFGGNLGRAVFQAKKRVLEPLGLVEEGAKTAPGKKRPVEQSPQEPDSSSGIGKSGQQPAKKRLNFGQTGDSESVPDPQPLGEPPEAPSGLGPNTMASGGGAPMADNNEGADGVGNSSGNWHCDSTWLGDRVITTSTRTWALPTYNNHLYKQISNGTSGGSTNDNTYFGYSTPWGYFDFNRFHCHFSPRDWQRLINNNWGFRPKRLNFKLFNIQVKEVTTNEGTKTIANNLTSTVQVFTDSEYQLPYVLGSAHQGCLPPFPADVFMVPQYGYLTLNNGSQALGRSSFYCLEYFPSQMLRTGNNFQFSYTFEDVPFHSSYAHSQSLDRLMNPLIDQYLYYLVRTQTTGTGGTQTLAFSQAGPSSMANQARNWVPGPCYRQQRVSTTTNQNNNSNFAWTGAAKFKLNGRDSLMNPGVAMASHKDDEDRFFPSSGVLIFGKQGAGNDGVDYSQVLITDEEEIKATNPVATEEYGAVAINNQAANTQAQTGLVHNQGVIPGMVWQNRDVYLQGPIWAKIPHTDGNFHPSPLMGGFGLKHPPPQILIKNTPVPADPPLTFNQAKLNSFITQYSTGQVSVEIEWELQKENSKRWNPEIQYTSNYYKSTNVDFAVNTEGVYSEPRPIGTRYLTRNL

SEQ ID NO: 134 - protein, 623 aa, Adeno-associated virus 9
MPGFYEIVIKVPSDLDEHLPGISDSFVNWVAEKEWELPPDSDMDRNLIEQAPLTVAEKLQRDFLVQWRRVSKAPEALFFVQFEKGESYFHLHVLVETTGVKSMVLGRFLSQIREKLVQTIYRGIEPTLPNWFAVTKTRNGAGGGNKVVDECYIPNYLLPKTQPELQWAWTNMEEYISACLNLAERKRLVAQHLTHVSQTQEQNKENLNPNSDAPVIRSKTSARYMELVGWLVDRGITSEKQWIQEDQASYISFNAASNSRSQIKAALDNAGKIMALTKSAPDYLVGPSLPVDITQNRIYRILQLNGYDPAYAGSVFLGWAQKKFGKRNTIWLFGPATTGKTNIAEAIAHAVPFYGCVNWTNENFPFNDCVDKMVIWWEEGKMTAKVVESAKAILGGSKVRVDQKCKSSAQIDPTPVIVTSNTNMCAVIDGNSTTFEHQQPLQDRMFKFELTRRLEHDFGKVTKQEVKEFFRWASDHVTEVAHEFYVRKGGASKRPAPDDADKSEPKRACPSVADPSTSDAEGAPVDFADRYQNKCSRHAGMLQMLLPCKTCERMNQNFNICFTHGVRDCSECFPGVSESQPVVRKRTYRKLCAIHHLLGRAPEIACSACDLVNVDLDDCVSEQ

SEQ ID NO: 135 - DNA, 2211 bp, Artificial Sequence
  source: /note="Description of Artificial Sequence: Synthetic polynucleotide"
atggctgccgatggttatcttccagattggctcgaggacaaccttagtgaaggaattcgcgagtggtgggctttgaaacctggagcccctcaacccaaggcaaatcaacaacatcaagacaacgctcgaggtcttgtgcttccgggttacaaataccttggacccggcaacggactcgacaagggggagccggtcaacgcagcagacgcggcggccctcgagcacgacaaggcctacgaccagcagctcaaggccggagacaacccgtacctcaagtacaaccacgccgacgccgagttccaggagcggctcaaagaagatacgtcttttgggggcaacctcgggcgagcagtcttccaggccaaaaagaggcttcttgaacctcttggtctggttgaggaagcggctaagacggctcctggaaagaagaggcctgtagagcagtctcctcaggaaccggactcctccgcgggtattggcaaatcgggtgcacagcccgctaaaaagagactcaatttcggtcagactggcgacacagagtcagtcccagaccctcaaccaatcggagaacctcccgcagccccctcaggtgtgggatctcttacaatggcttcaggtggtggcgcaccagtggcagacaataacgaaggtgccgatggagtgggtagttcctcgggaaattggcattgcgattcccaatggctgggggacagagtcatcaccaccagcacccgaacctgggccctgcccacctacaacaatcacctctacaagcaaatctccaacagcacatctggaggatcttcaaatgacaacgcctacttcggctacagcaccccctgggggtattttgacttcaacagattccactgccacttctcaccacgtgactggcagcgactcatcaacaacaactggggattccggcctaagcgactcaacttcaagctcttcaacattcaggtcaaagaggttacggacaacaatggagtcaagaccatcgccaataaccttaccagcacggtccaggtcttcacggactcagactatcagctcccgtacgtgctcgggtcggctcacgagggctgcctcccgccgttcccagcggacgttttcatgattcctcagtacgggtatctgacgcttaatgatggaagccaggccgtgggtcgttcgtccttttactgcctggaatatttcccgtcgcaaatgctaagaacgggtaacaacttccagttcagctacgagtttgagaacgtacctttccatagcagctacgctcacagccaaagcctggaccgactaatgaatccactcatcgaccaatacttgtactatctctcaaagactattaacggttctggacagaatcaacaaacgctaaaattcagtgtggccggacccagcaacatggctgtccagggaagaaactacatacctggacccagctaccgacaacaacgtgtctcaaccactgtgactcaaaacaacaacagcgaatttgcttggcctggagcttcttcttgggctctcaatggacgtaatagcttgatgaatcctggacctgctatggccagccacaaagaaggagaggaccgtttctttcctttgtctggatctttaatttttggcaaacaaggaactggaagagacaacgtggatgcggacaaagtcatgataaccaacgaagaagaaattaaaactactaacccggtagcaacggagtcctatggacaagtggccacaaaccaccagagtgcccaagcacaggcgcagaccggctgggttcaaaaccaaggaatacttccgggtatggtttggcaggacagagatgtgtacctgcaaggacccatttgggccaaaattcctcacacggacggcaactttcacccttctccgctgatgggagggtttggaatgaagcacccgcctcctcagatcctcatcaaaaacacacctgtacctgcggatcctccaacggccttcaacaaggacaagctgaactctttcatcacccagtattctactggccaagtcagcgtggagatcgagtgggagctgcagaaggaaaacagcaagcgctggaacccggagatccagtacacttccaactattacaagtctaataatgttgaatttgctgttaatactgaaggtgtatatagtgaaccccgccccattggcaccagatacctgactcgtaatctgtaa

SEQ ID NO: 136 - protein, 736 aa, Artificial Sequence; identical to SEQ ID NO: 132
  source: /note="Description of Artificial Sequence: Synthetic polypeptide"

SEQ ID NO: 137 - DNA, 2460 bp, Artificial Sequence
  source: /note="Description of Artificial Sequence: Synthetic polynucleotide"
ggtaattcctccggaaattggcattgcgattccacatggctgggcgaccgagtcattaccaccagcacccggacttgggccctgcccacctacaacaaccacctctacaagcaaatctccagccaatcgggtgccaccaacgacaaccactacttcggctacagcaccccttgggggtattttgatttcaacagattccactgccatttctcaccacgtgactggcagcgactcatcaacaacaactggggattcatggctgccgatggttatcttccagattggctcgaggacactctctctgaaggaatcagacagtggtggaagctcaaacctggcccaccaccgccgaaacctaaccaacaacaccgggacgacagtaggggtcttgtgcttcctgggtacaagtacctcggacccttcaacggactcgacaaaggagagccggtcaacgaggcagacgccgcggccctcgagcacgacaaagcctacgaccaccagctcaagcaaggggacaacccgtacctcaaatacaaccacgcggacgctgaatttcaggagcgtcttcaagaagatacgtctttcgggggcaacctcgggcgagcagtcttccaggccaaaaagagggtactcgagcctcttggtctggttgaggaagctgttaagacggctcctggaaaaaagagacctatagagcagtctcctgcagaaccggactcttcctcgggcatcggcaaatcaggccagcagcccgctaagaaaagactcaattttggtcagactggcgacacagagtcagtcccagaccctcaaccaatcggagaaccccccgcagccccctctggtgtgggatctaatacaatggcttcaggcggtggggcaccaatggcagacaataacgaaggcgccgacggagtgggtaattcctcgggaaattggcattgcgattccacatggatgggcgacagagttatcaccaccagcacaagaacctgggccctccccacctacaataatcacctctacaagcaaatctccagcgaatcgggagccaccaacgacaaccactacttcggctacagcaccccctgggggtattttgactttaacagattccactgtcacttctcaccacgtgactggcagcgactcatcaacaacaactggggatttagacccaagaaactcaatttcaagctcttcaacatccaagtcaaggaggtcacgcagaatgatggaaccacgaccatcgccaataaccttaccagcacggtgcaggtcttcacagactctgagtaccagctgccctacgtcctcggttcggctcaccagggctgccttccgccgttcccagcagacgtcttcatgattcctcagtacggctacttgactctgaacaatggcagccaagcggtaggacgttcttcattctactgtctagagtattttccctctcagatgctgaggacgggaaacaacttcaccttcagctacacttttgaagacgtgcctttccacagcagctacgcgcacagccagagtctggatcggctgatgaatcctctcattgaccagtacctgtattacctgagcaaaactcagggtacaagtggaacaacgcagcaatcgagactgcagttcagccaagctgggcctagctccatggctcagcaggccaaaaactggctaccgggacccagctaccgacagcagcgaatgtctaagacggctaatgacaacaacaacagtgaatttgcttggactgcagccaccaaatattacctgaatggaagaaattctctggtcaatcccgggcccccaatggccagtcacaaggacgatgaggaaaagtatttccccatgcacggaaatctcatctttggaaaacaaggcacaggaactaccaatgtggacattgaatcagtgcttattacagacgaagaagaaatcagaacaactaatcctgtggctacagaacaatacggacaggttgccaccaaccatcagagtcagaacaccacagcttcctatggaagtgtggacagccagggaatcttacctggaatggtgtggcaggaccgcgatgtctatcttcaaggtcccatttgggccaaaactcctcacacggacggacactttcatccttctccgctcatgggaggctttggactgaaacaccctcctccccagatcctgatcaaaaacacacctgtgccagcgaatcccgcgaccactttcactcctggaaagtttgcttcgttcattacccagtattccaccggacaggtcagcgtggaaatagagtgggagctgcagaaagaaaacagcaaacgctggaacccagaaattcagtacacctccaactacaacaagtcggtgaatgtggagtttaccgtggacgcaaacggtgtttattctgaaccccgccctattggcactcgttaccttacccggaacttg

SEQ ID NO: 138 - DNA, 3123 bp, Artificial Sequence
  source: /note="Description of Artificial Sequence: Synthetic polynucleotide"
gaattcgccctttctacggctgcgtcaactggaccaatgaaaactttcccttcaacgattgcgtcgacaagatggtgatctggtgggaggagggaaagatgaccgccaaggtcgtggaatctgccaaagccattctgggtggaggcaaggttcgtgtggaccagaaatgcaagtcttcggcccagatcgacccgactccggtgattgtcacctctaacaccaacatgtgcgccgtgattgacggaaactcgaccaccttcgagcaccagcagccgttgcaagaccggatgttcaaatttgaacttacccgccgtttggatcatgactttgggaaggtcaccaagcaggaagtcaaagactttttccggtgggctcaagatcacgtgactgaggtggagcatgagttctacgtcaaaaagggtggagccaagaaaaggcccgcccccgatgatgtatatataaatgagcccaagcgggcgcgcgagtcagttgcgcagccatcgacgtcagacgcggaagcttcgataaactacgcggacaggtaccaaaacaaatgttctcgtcacgtgggcatgaatctgatgctgtttccctgtcgacaatgcgaaagaatgaatcagaattcaaatatctgcttcacacacgggcaaaaagactgtttggaatgctttcccgtgtcagaatctcaacccgtttctgtcgtcagaaaaacgtatcagaaactttgttacattcatcatatcatgggaaaagtaccagacgcctgcactgcctgcgacctggtaaatgtggacttggatgactgtatttctgagcaataaatgacttaaatcaggtatggctgctgacggttatcttccagattggctcgaggacactctctctgaaggaatcagacagtggtggaagctcaaacctggcccaccaccgccgaaacctaaccaacaacaccgggacgacagtaggggtcttgtgcttcctgggtacaagtacctcggacccttcaacggactcgacaaaggagagccggtcaacgaggcagacgccgcggccctcgagcacgacaaagcctacgaccaccagctcaagcaaggggacaacccgtacctcaaatacaaccacgcggacgctgaatttcaggagcgtcttcaagaagatacgtctttcgggggcaacctcgggcgagcagtcttccaggccaaaaagagggtactcgagcctcttggtctggttgaggaagctgttaagacggctcctggaaaaaagagacctatagagcagtctcctgcagaaccggactcttcctcgggcatcggcaaatcaggccagcagcccgctaagaaaagactcaattttggtcagactggcgacacagagtcagtcccaggccctcaaccaatcggagaaccccccgcagccccctctggtgtgggatctaatacaatggcttcaggcggtggggcaccaatggcagacaataacgaaggcgccgacggagtgggtaattcctcgggaaattggcattgcgattccacatggatgggcgacagagttatcaccaccagcacaagaacctgggccctccccacctacaataatcacctctacaagcaaatctccagcgaatcgggagccaccaacgacaaccactacttcggctacagcaccccctgggggtattttgactttaacagattccactgtcacttctcaccacgtgactggcagcgactcatcaacaacaactggggatttagacccaagaaactcaatttcaagctcttcaacatccaagtcaaggaggtcacgcagaatgatggaaccacgaccatcgccaataaccttaccagcgcggtgcaggtcttcacagactctgagtaccagctgccctacgtcctcggttcggctcaccagggctgccttccgccgttcccagcagacgtcttcatgattcctcagtacggctacttgactctgaacaatggcagccaagcggtaggacgttcttcattctactgtctagagtattttccctctcagatgctgaggacgggaaacaacttcaccttcagctacacttttgaagacgtgcctttccacagcagctacgcgcacagccagagtctggatcggctgatgaatcctctcattgaccagtacctgtattacctgagcaaaactcagggtacaagtggaacaacgcagcaatcgagactgcagttcagccaagctgggcctagctccatggctcagcaggccaaaaactggctaccgggacccagctaccgacagcagcgaatgtctaagacggctaatgacaacaacaacagtgaatttgcttggactgcagccaccaaatattacctgaatggaagaaattctctggtcaatcccgggcccccagtggccagtcacaaggacgatgaggaaaagtatttccccatgcacggaaatctcatctttggaaaacaaggcacaggaactaccaatgtggacattgaatcagtgcttattacagacgaagaagaaatcagaacaactaatcctgtggctacagaacaatacggacaggttgccaccaaccatcagagtcagaacaccacagcttcctatggaagtgtggacagccagggaatcttacctggaatggtgtggcaggaccgcgatgtctatcttcaaggtcccatttgggccaaaactcctcacacggacggacactttcatccttctccgctcatgggaggctttggactgaaacaccctcctccccagatcctgatcaaaaacacacctgtgccagcgaatcccgcgaccactttcactcctggaaagtttgcttcgttcattacccagtattccacctgacaggtcagcgtggaaatagagtgggagctgcagaaagaaaacagcaaacgctggaacccagaaattcagtacacctccaactacaacaagtcggtgaatgtggagtttaccgtggacgcaaacggtgtttattctgaaccccgccctattggcactcgttaccttacccggaacttgtaatttcctgttaatgaataagccgatttatgcgtttcagttgaactttggtctctgcgaagggcgaattcgtttaaacct

SEQ ID NO: 139 - protein, 735 aa, Artificial Sequence
  source: /note="Description of Artificial Sequence: Synthetic polypeptide"
MAADGYLPDWLEDTLSEGIRQWWKLKPGPPPPKPNQQHRDDSRGLVLPGYKYLGPFNGLDKGEPVNEADAAALEHDKAYDHQLKQGDNPYLKYNHADAEFQERLQEDTSFGGNLGRAVFQAKKRVLEPLGLVEEAVKTAPGKKRPIEQSPAEPDSSSGIGKSGQQPAKKRLNFGQTGDTESVPGPQPIGEPPAAPSGVGSNTMASGGGAPMADNNEGADGVGNSSGNWHCDSTWMGDRVITTSTRTWALPTYNNHLYKQISSESGATNDNHYFGYSTPWGYFDFNRFHCHFSPRDWQRLINNNWGFRPKKLNFKLFNIQVKEVTQNDGTTTIANNLTSAVQVFTDSEYQLPYVLGSAHQGCLPPFPADVFMIPQYGYLTLNNGSQAVGRSSFYCLEYFPSQMLRTGNNFTFSYTFEDVPFHSSYAHSQSLDRLMNPLIDQYLYYLSKTQGTSGTTQQSRLQFSQAGPSSMAQQAKNWLPGPSYRQQRMSKTANDNNNSEFAWTAATKYYLNGRNSLVNPGPPVASHKDDEEKYFPMHGNLIFGKQGTGTTNVDIESVLITDEEEIRTTNPVATEQYGQVATNHQSQNTTASYGSVDSQGILPGMVWQDRDVYLQGPIWAKTPHTDGHFHPSPLMGGFGLKHPPPQILIKNTPVPANPATTFTPGKFASFITQYSTGQVSVEIEWELQKENSKRWNPEIQYTSNYNKSVNVEFTVDANGVYSEPRPIGTRYLTRNL

SEQ ID NO: 140 - DNA, 3123 bp, Artificial Sequence
  source: /note="Description of Artificial Sequence: Synthetic polynucleotide"
gaattcgccctttctacggctgcgtcaactggaccaatgaaaactttcccttcaacgattgcgtcgacaagatggtgatctggtgggaggagggaaagatgaccgccaaggtcgtggaatctgccaaagccattctgggtggaagcaaggttcgtgtggaccagaaatgcaagtcttcggcccagatcgacccgactccggtgattgtcacctctaacaccaacatgtgcgccgtgattgacggaaactcgaccaccttcgagcaccagcagccgttgcaagaccggatgttcaaatttgaacttacccgccgtttggatcatgactttgggaaggtcaccaagcaggaagtcaaagactttttccggtgggctcaagatcacgtgactgaggtggagcatgagttctacgtcaaaaagggtggagccaagaaaaggcccgcccccgatgatgtatatataaatgagcccaagcgggcgcgcgagtcagttgcgcagccatcgacgtcagacgcggaagcttcgataaactacgcgggcaggtaccaaaacaaatgttctcgtcacgtgggcatgaatctgatgctgtttccctgtcgacaatgcgaaagaatgaatcagaattcaaatatctgcttcacacacgggcaaaaagactgtttggaatgctttcccgtgtcagaatctcaacccgtttctgtcgtcagaaaaacgtatcagaaactttgttacattcatcatatcatgggaaaagaaccagacgcctgcactgcctgcgacctggtaaatgtggacttggatgactgtatttctgagcaataaatgacttaaatcaggtatggctgctgacggttatcttccagattggctcgaggacactctctctgaaggaatcagacagtggtggaagctcaaacctggcccaccaccgccgaaacctaaccaacaacaccgggacgacagtaggggtcttgtgcttcctgggtacaagtacctcggacccttcaacggactcgacaaaggagagccggtcaacgaggcagacgccgcggccctcgagcacgacaaagcctacgaccaccagctcaagcaaggggacaacccgtacctcaaatacaaccacgcggacgctgaatttcaggagcgtcttcaagaagatacgtctttcgggggcaacctcgggcgagcagtcttccaggccaaaaagagggtactcgagcctcttggtctggttgaggaagctgttaagacggctcctggaaaaaagagacctatagagcagtctcctgcagaaccggactcttcctcgggcatcggcgaatcaggccagcagcccgctaagaaaagactcaattttggtcagactggcgacacagagtcagtcccagaccctcaaccaatcggagaaccccccgcagccccctctggtgtgggatctaatacaatggcttcaggcggtggggcaccaatggcagacgataacgaaggcgccgacggagtgggtaattcctcgggaaattggcattgcgattccacatggatgggcgacagagttatcaccaccagcacaagaacctgggccctccccacctacaataatcacctctacaagcaaatctccagcgaatcgggagccaccaacgacaaccactacttcggctacagcaccccctgggggtattttgactttaacagattccactgtcacttctcaccacgtgactggcagcgactcatcaacaacaactggggatttagacccaagaaactcaatttcaagctcttcaacatccaagtcaaggaggtcacgcagaatgatggaaccacgaccatcgccaataaccttaccagcacggtgcaggtcttcacagactctgagtaccagctgccctacgtcctcggttcggctcaccagggctgccttccgccgttcccagcagacgtcttcatgattcctcagtacggctacttgactctgaacaatggcagccaagcggtaggacgttcttcattctactgtctagagtattttccctctcagatgctgaggacgggaaacaacttcaccttcagctacacttttgaagacgtgcctttccacagcagctacgcgcacagccagagtctggatcggctgatgaatcctctcattgaccagtacctgtattacctgagcaaaactcagggtacaagtggaacaacgcagcaatcgagactgcagttcagccaagctgggcctagctccatggctcagcaggccaaaaactggctaccgggacccagctaccgacagcagcgaatgtctaagacggctaatgacaacaacaacagtgaatttgcttggactgcagccaccaaatattacctgaatggaagaaattctctggtcaatcccgggcccccaatggccagtcacaaggacgatgaggaaaagtatttccccatgcacggaaatctcatctttggaaaacaaggcacaggaactaccaatgtggacattgaatcagtgcttattacagacgaagaagaaatcagaacaactaatcctgtggctacagaacaatacggacaggttgccaccaaccatcagagtcaggacaccacagcttcctatggaagtgtggacagccagggaatcttacctggaatggtgtggcaggaccgcgatgtctatcttcaaggtcccatttgggccaaaactcctcacacggacggacactttcatccttctccgctcatgggaggctttggactgaaacaccctcctccccagatcctgatcaaaaacacacctgtgccagcgaatcccgcgaccactttcactcctggaaagtttgcttcgttcattacccagtattccaccggacaggtcagcgtggaaatagagtgggagctgcagaaagaaaacagcaaacgctggaacccagaaattcagtacacctccaactacaacaagtcggtgaatgtggagtttaccgtggacgcaaacggtgtttattctgaaccccgccctattggcactcgttaccttacccggaacttgtaatttcctgttaatgaataaaccgatttatgcgtttcagttgaactttggtctctgcgaagggcgaattcgcggccgcta

SEQ ID NO: 141 - protein, 735 aa, Artificial Sequence
  source: /note="Description of Artificial Sequence: Synthetic polypeptide"
MAADGYLPDWLEDTLSEGIRQWWKLKPGPPPPKPNQQHRDDSRGLVLPGYKYLGPFNGLDKGEPVNEADAAALEHDKAYDHQLKQGDNPYLKYNHADAEFQERLQEDTSFGGNLGRAVFQAKKRVLEPLGLVEEAVKTAPGKKRPIEQSPAEPDSSSGIGESGQQPAKKRLNFGQTGDTESVPDPQPIGEPPAAPSGVGSNTMASGGGAPMADDNEGADGVGNSSGNWHCDSTWMGDRVITTSTRTWALPTYNNHLYKQISSESGATNDNHYFGYSTPWGYFDFNRFHCHFSPRDWQRLINNNWGFRPKKLNFKLFNIQVKEVTQNDGTTTIANNLTSTVQVFTDSEYQLPYVLGSAHQGCLPPFPADVFMIPQYGYLTLNNGSQAVGRSSFYCLEYFPSQMLRTGNNFTFSYTFEDVPFHSSYAHSQSLDRLMNPLIDQYLYYLSKTQGTSGTTQQSRLQFSQAGPSSMAQQAKNWLPGPSYRQQRMSKTANDNNNSEFAWTAATKYYLNGRNSLVNPGPPMASHKDDEEKYFPMHGNLIFGKQGTGTTNVDIESVLITDEEEIRTTNPVATEQYGQVATNHQSQDTTASYGSVDSQGILPGMVWQDRDVYLQGPIWAKTPHTDGHFHPSPLMGGFGLKHPPPQILIKNTPVPANPATTFTPGKFASFITQYSTGQVSVEIEWELQKENSKRWNPEIQYTSNYNKSVNVEFTVDANGVYSEPRPIGTRYLTRNL

SEQ ID NO: 142 - DNA, 3113 bp, Artificial Sequence
  source: /note="Description of Artificial Sequence: Synthetic polynucleotide"
gaattcgccctttctacggctgcgtcaactggaccaatgaaaactttcccttcaacgattgcgtcgacaagatggtgatctggtgggaggagggaaagatgaccgccaaggtcgtggaatctgccaaagccattctgggtggaagcaaggttcgtgtggaccagaaatgcaagtcttcggcccagatcgacccgactccggtgattgtcacctctaacaccaacatgtgcgccgtgattgacggaaactcgaccaccttcgagcaccagcagccgttgcaagaccggatgttcaaatttgaacttacccgccgtttggatcatgactttgggaaggtcaccaagcaggaagtcaaagactttttccggtgggctcaagatcacgtgactgaggtggagcatgagttctacgtcaaaaagggtggagccaagaaaaggcccgcccccgatgatgtatatataaatgagcccaagcgggcgcgcgagtcagttgcgcagccatcgacgtcagacgcggaagcttcgataaactacgcggacaggtaccaaaacaaatgttctcgtcacgtgggcatgaatctgatgctgtttccctgtcgacaatgcgaaagaatgaatcagaattcaaatatctgcttcacacacgggcaaaaagactgtttggaatgctttcccgtgtcagaatctcaacccgttcctgtcgtcagaaaaacgtatcagaaactttgttacattcatcatatcatgggaaaagtaccagacgcctgcactgcctgcgacctggtaaatgtggacttggatgactgtatttctgagcaataaatgacttaaatcaggtatggctgctgacggttatcttccagattggctcgaggacactctctctgaaggaatcagacagtggtggaagctcaaacctggcccaccaccgccgaaacctaaccaacaacaccgggacgacagtaggggtcttgtgcttcctgggtacaagtacctcggacccttcaacggactcgacaaaggagagccggtcaacgaggcagacgccgcggccctcgagcacgacaaagcctacgaccaccagctcaagcaaggggacaacccgtacctcaaatacaaccacgcggacgctgaatttcaggagcgtcttcaagaagatacgtctttcgggggcaacctcgggcgagcagtcttccaggccaaaaagagggtactcgagcctcttggtctggttgaggaagctgttaagacggctcctggaaaaaagagacctatagagcagtctcctgcagaaccggactcttcctcgggcatcggcaaatcaggccagcagcccgctaagaaaagactcaattttggtcagactggcgacacagagtcagtcccagaccctcaaccaatcggagaaccccccgcagccccctctggtgtgggatctaatacaatggcttcaggcggtggggcaccaatggcagacaataacgaaggcgccgacggagtgggtaattcctcgggaaattggcattgcgattccacatggatgggcgacagagttatcaccaccagcacaagaacctgggccctccccacctacaataatcacctctacaagcaaatctccagcgaatcgggagccaccaacgacaaccactacttcggctacagcaccccctgggggtattttgactttaacagattccactgtcacttctcaccacgtgactggcagcgactcatcaataacaactggggatttagacccaagaaactcaatttcaagctcttcaacatccaagtcaaggaggtcacgcagaatgatggaaccacgaccatcgccaataaccttaccagcacggtgcaggtcttcacagactctgagtaccagctgccctacgtcctcggttcggctcaccagggctgccttccgccgttcccagcagacgtcttcatgattcctcagtacggctacttgactctgaacaatggcagccaagcggtaggacgttcttcattctactgtctagagtattttccctctcagatgctgaggacgggaaacaacttcaccttcagctacacttttgaagacgtgcctttccacagcagctacgcgcacagccagagtctggatcggctgatgaatcctctcattgaccagtacctgtattacctgagcaaaactcagggtacaagtggaacaacgcagcaatcgagactgcagttcaaccaagctgggcctagctccatggctcagcaggccaaaaactggctaccgggacccagctaccgacagcagcgaatgtctaagacggctaatgacaacaacaacagtgaatttgcttggactgcagccaccaaatattacccgaatggaagaaattctctggtcaatcccgggcccccaatggccagtcacaaggacgatgaggaaaagtatttccccatgcacggaaatctcatctttggaaaacaaggcacaggaactaccaatgtggacattgaatcagtgcttattacagacgaagaagaaatcagaacgactaatcctgtggctacagaacaatacggacaggttgccaccaaccgtcagagtcagaacaccacagcttcctatggaagtgtggacagccagggaatcttacctggaatggtgtggcaggaccgcgatgtctatcttcaaggtcccatttgggccaaaactcctcacacggacggacactttcatccttctccgctcatgggaggctttggactgaaacaccctcctccccagatcctgatcaaaaacacacctgtgccagcgaatcccgcgaccactttcactcctggaaagtttgcttcgttcattacccagtattccaccggacaggtcagcgtggaaatagagtgggagctgcagaaagaaaacagcaaacgctggaacccggaaattcagtacacctccaactacaacaagtcggtgaatgtggagtttaccgtggacgcaaacggtgtttattctgaaccccgccctattggcactcgttaccttacccggaacttgtaatttcctgttaatgaataaaccgatttatgcgtttcagttgaactttggtctctgcgaagggcgaattc

SEQ ID NO: 143 - protein, 735 aa, Artificial Sequence
  source: /note="Description of Artificial Sequence: Synthetic polypeptide"
MAADGYLPDWLEDTLSEGIRQWWKLKPGPPPPKPNQQHRDDSRGLVLPGYKYLGPFNGLDKGEPVNEADAAALEHDKAYDHQLKQGDNPYLKYNHADAEFQERLQEDTSFGGNLGRAVFQAKKRVLEPLGLVEEAVKTAPGKKRPIEQSPAEPDSSSGIGKSGQQPAKKRLNFGQTGDTESVPDPQPIGEPPAAPSGVGSNTMASGGGAPMADNNEGADGVGNSSGNWHCDSTWMGDRVITTSTRTWALPTYNNHLYKQISSESGATNDNHYFGYSTPWGYFDFNRFHCHFSPRDWQRLINNNWGFRPKKLNFKLFNIQVKEVTQNDGTTTIANNLTSTVQVFTDSEYQLPYVLGSAHQGCLPPFPADVFMIPQYGYLTLNNGSQAVGRSSFYCLEYFPSQMLRTGNNFTFSYTFEDVPFHSSYAHSQSLDRLMNPLIDQYLYYLSKTQGTSGTTQQSRLQFNQAGPSSMAQQAKNWLPGPSYRQQRMSKTANDNNNSEFAWTAATKYYPNGRNSLVNPGPPMASHKDDEEKYFPMHGNLIFGKQGTGTTNVDIESVLITDEEEIRTTNPVATEQYGQVATNRQSQNTTASYGSVDSQGILPGMVWQDRDVYLQGPIWAKTPHTDGHFHPSPLMGGFGLKHPPPQILIKNTPVPANPATTFTPGKFASFITQYSTGQVSVEIEWELQKENSKRWNPEIQYTSNYNKSVNVEFTVDANGVYSEPRPIGTRYLTRNL

SEQ ID NO: 144 - DNA, 3122 bp, Artificial Sequence
  source: /note="Description of Artificial Sequence: Synthetic polynucleotide"
agcggccgcgaattcgccctttctacggctgcgtcaactggaccaatgaaaactttcccttcaacgattgcgtcgacaagatggtgatctggtgggaggagggaaagatgaccgccaaggtcgtggaatctgccaaagccattctgggtggaagcaaggttcgtgtggaccagaaatgcaggtcttcggcccagatcgacccgactccggtgattgtcacctctaacaccaacatgtgcgccgtgattgacggaaactcgaccaccttcgagcaccagcagccgttgcaagaccggatgttcaaatttgaacttacccgccgtttggatcatgactttgggaaggtcaccaagcaggaagtcaaagactttttccggtgggctcaagatcacgtgactgaggtggagcatgagttctacgtcaaaaagggtggagccaagaaaaggcccgcccccgatgatgtatatataaatgagcccaagcgggcgcgcgagtcagttgcgcagccatcgacgtcagacgcggaagcttcgataaactacgcggacaggtaccaaaacaaatgttctcgtcacgtgggcatgaatctgatgctgtttccctgtcgacaatgcgaaagaatgaatcagaattcaaatatctgcttcacacacgggcaaaaagactgtttggaatgctttcccgtgtcagaatctcaacccgtttctgtcgtcagaaaaacgtatcagaaactttgttacattcatcatatcatgggaaaagtaccagacgcctgcactgcctgcgacctggtaaatgtggacttggatgactgtatttctgagcaataaatgacttaaatcaggtatggctgctgacggttatcttccagattggctcgaggacactctctctgaaggaatcagacagtggtggaagctcaaacctggcccaccaccgccgaaacctaaccaacaacaccgggacgacagtaggggtcttgtgcttcctgggtacaagtacctcggacccttcaacggactcgacaaaggagagccggtcaacgaggcagacgccgcggccctcgagcacgacaaagcctacgaccaccagctcaagcaaggggacaacccgtacctcaaatacaaccacgcggacgctgaatttcaggagcgtcttcaagaagatacgtctttcgggggcaacctcgggcgagcagtcttccaggccaaaaagagggtactcgagcctcttggtctggttgaggaagctgttaagacggctcctggaaaaaagagacctatagagcagtctcctgcagaaccggactcttcctcgggcatcggcaaatcaggccagcagcccgctaagaaaagactcaattttggtcagactggcgacacagagtcagtcccagaccctcaaccaatcggagaaccccccgcagccccctctggtgtgggatctaatacaatggcttcaggcggtggggcaccaatggcagacaataacgaaggcgccgacggagtgggtaattcctcgggaaattggcattgcgattccacatggatgggcgacagagttatcaccaccagcacaagaacctgggccctccccacctacaataatcgcctctacaagcaaatctccagcgaatcgggagccaccaacgacaaccactacttcggctacagcaccccctgggggtattttgactttaacagattccactgtcacttctcaccacgtgactggcagcgactcatcaacaacaactggggatttagacccaagaaactcaatttcaagctcttcaacatccaagtcaaggaggtcacgcagaatgatggaaccacgaccatcgccaataaccttaccagcacggtgcaggtcttcacagactctgagtaccagctgccctacgtcctcggttcggctcaccagggctgccttccgccgttcccagcagacgtcttcatgattcctcagtacggctacttgactctgaacaatggcagccaagcggtaggacgttcttcattctactgtctagagtattttccctctcagatgctgaggacgggaaacaacttcaccttcagctacacttttgaagacgtgcctttccacagcagctacgcgcacagccagagtctggatcggctgatgaatcctctcattgaccagtacctgtattacctgagcaaaactcagggtacaagtggaacaacgcagcaatcgagactgcagttcagccaagctgggcctagctccatggctcagcaggccaaaaactggctaccgggacccagctaccgacagcagcgaatgtctaagacggctaatgacaacaacaacagtgaatttgcttggactgcagccaccaaatattacctgaatggaagaaattctctggtcaatcccgggcccccaatggccagtcacaaggacgatgaggaaaagtatttccccatgcacggaaatctcatctttggaaaacaaggcacaggaactaccaatgtggacattgaatcagtgcttattacagacgaagaagaaatcagaacaactaatcctgtggctacagaacaatacggacaggttgccaccaaccatcagagtcagaacaccacagcttcctatggaagtgtggacagccagggaatcttacctggaatggtgtggcaggaccgcgatgtctatcttcaaggtcccatttgggccaaaactcctcacacggacggacactttcatccttctccgctcatgggaggctttggactgaaacaccctcctccccagatcctgatcaaaaacacacctgtgccagcgaatcccgcgaccactttcactcctggaaagtttgcttcgttcattacccagtattccaccggacaggtcagcgtggaaatagagtgggagctgcagaaagaaaacagcaaacgctggaacccagaaattcagtacacctccaactacaacaagtcggtgaatgtggagtttaccgtggacgcaaacggtgtttattctgaaccccgccctattggcactcgttaccttacccggaacttgtaatttcctgttaatgaataaaccgatttatgcgtttcagttgaactttggtctctgcgaagggcgaattc

SEQ ID NO: 145 - protein, 735 aa, Artificial Sequence
  source: /note="Description of Artificial Sequence: Synthetic polypeptide"
MAADGYLPDWLEDTLSEGIRQWWKLKPGPPPPKPNQQHRDDSRGLVLPGYKYLGPFNGLDKGEPVNEADAAALEHDKAYDHQLKQGDNPYLKYNHADAEFQERLQEDTSFGGNLGRAVFQAKKRVLEPLGLVEEAVKTAPGKKRPIEQSPAEPDSSSGIGKSGQQPAKKRLNFGQTGDTESVPDPQPIGEPPAAPSGVGSNTMASGGGAPMADNNEGADGVGNSSGNWHCDSTWMGDRVITTSTRTWALPTYNNRLYKQISSESGATNDNHYFGYSTPWGYFDFNRFHCHFSPRDWQRLINNNWGFRPKKLNFKLFNIQVKEVTQNDGTTTIANNLTSTVQVFTDSEYQLPYVLGSAHQGCLPPFPADVFMIPQYGYLTLNNGSQAVGRSSFYCLEYFPSQMLRTGNNFTFSYTFEDVPFHSSYAHSQSLDRLMNPLIDQYLYYLSKTQGTSGTTQQSRLQFSQAGPSSMAQQAKNWLPGPSYRQQRMSKTANDNNNSEFAWTAATKYYLNGRNSLVNPGPPMASHKDDEEKYFPMHGNLIFGKQGTGTTNVDIESVLITDEEEIRTTNPVATEQYGQVATNHQSQNTTASYGSVDSQGILPGMVWQDRDVYLQGPIWAKTPHTDGHFHPSPLMGGFGLKHPPPQILIKNTPVPANPATTFTPGKFASFITQYSTGQVSVEIEWELQKENSKRWNPEIQYTSNYNKSVNVEFTVDANGVYSEPRPIGTRYLTRNL

SEQ ID NO: 146 - DNA, 3121 bp, Artificial Sequence
  source: /note="Description of Artificial Sequence: Synthetic polynucleotide"
gaattcgcccttcgcagagaccaaagttcaactgaaacgaatcaaccggtttattgattaacaagcaattacagattacgggtgaggtaacgggtgccgatggggcgaggctcagaataagtgccatctgtgttaacagcaaagtccacatttgtagatttgtagtagttggaagtgtattgaatctctgggttccagcgtttgctgttttctttctgcagctcccattcaatttccacgctgacctgtccggtgctgtactgcgtgatgaacgacgccagcttagcttgactgaaggtagttggaggatccgcgggaacaggtgtattcttaatcaggatctgaggaggcgggtgtttcagtccaaagccccccatcagcggcgagggatgaaagtttccgtccgtgtgaggaatcttggcccagataggaccctgcaggtacacgtcccggttctgccagaccatgccaggtaaggctccttgactgttgacggcccctacaataggagcggcgttttgctgttgcaggttatcggccaccacgccgtactgttctgtggccactgggttggtggttttaatttcttcctcactggttagcataacgctgctatagtccacgttgccttttccagctccctgtttcccaaacattaagactccgctggacggaaaaaatcgctcttcgtcgtccttgtgggttgccatagcgacaccgggatttaccagagagtctctgccattcagatgatacttggtggcaccggtccaggcaaagttgctgttgttattttgcgacagtgtcgtggagacgcgttgctgccggtagcagggcccgggtagccagtttttggcctgagccgacatgttattaggcccggcctgagaaaatagcaactgctgagttcctgcggtacctcccgtggactgagtccgagacaggtagtacaggtactggtcgatgagggggttcatcagccggtccaggctttggctgtgcgcgtagctgctgtgaaaaggcacgtcctcaaactggtagctgaactcaaagttgttgcccgttctcagcatttgagaaggaaagtactccaggcagtagaaggaggaacggcccacggcctgactgccattgttcagagtcaggtacccgtactgaggaatcatgaagacgtccgccgggaacggaggcaggcagccctggcgcgcagagccgaggacgtacgggagctggtattccgagtccgtaaagacctgaatcgtgctggtaaggttattggcgatggtcttggtgccttcattctgcgtgacctccttgacctggatgttgaagagcttgaagttgagtctcttgggccggaatccccagttgttgttgatgagtcgctgccagtcacgtggtgagaagtggcagtggaatctgttaaagtcaaaatacccccagggggtgctgtagccgaagtaggtgttgtcgttggtgcttcctcccgaagtcccgttggagatttgcttgtagaggtggttgttgtaggtggggagggcccaggttcgggtgctggtggtgatgactctgtcgcccagccatgtggaatcgcaatgccaatttcctgaggaactacccactccgtcggcgccttcgttattgtctgccattggagcgccaccgcctgcagccattgtaccagatcccagaccagaggggcctgcggggggttctccgattggttgagggtcgggcactgactctgagtcgccagtctgcccaaagttgagtctctttttcgcgggctgctggcctttcttgccgatgcccgtagtggagtctggagaacgctggggtgatggctctaccggtctcttctttccaggagccgtcttagcgccttcctcaaccagaccgagaggttcgagaacccgcttcttggcctggaagactgctcgtccgaggttgcccccaaaagacgtatcttcttgcagacgctcctgaaactcggcgtcggcgtggttataccgcaggtacggattgtcacccgctttgagctgctggtcgtaggccttgtcgtgctcgagggccgctgcgtccgccgcgttgacgggctcccccttgtcgagtccgttgaagggtccgaggtacttgtagccaggaagcaccagaccccggccgtcgtcctgcttttgctggttggctttgggcttcggggctccaggtttcagcgcccaccactcgcgaatgccctcagagaggttgtcctcgagccaatctggaagataaccatcggcagccatacctgatctaaatcatttattgttcaaagatgcagtcatccaaatccacattgaccagatcgcaggcagtgcaagcgtctggcacctttcccatgatatgatgaatgtagcacagtttctgatacgcctttttgacgacagaaacgggttgagattctgacacgggaaagcactctaaacagtctttctgtccgtgagtgaagcagatatttgaattctgattcattctctcgcattgtctgcagggaaacagcatcagattcatgcccacgtgacgagaacatttgttttggtacctgtccgcgtagttgatcgaagcttccgcgtctgacgtcgatggctgcgcaactgactcgcgcacccgtttgggctcacttatatctgcgtcactgggggcgggtcttttcttggctccaccctttttgacgtagaattcatgctccacctcaaccacgtgatcctttgcccaccggaaaaagtctttgacttcctgcttggtgaccttcccaaagtcatgatccagacggcgggtgagttcaaatttgaacatccggtcttgcaacggctgctggtgttcgaaggtcgttgagttcccgtcaatcacggcgcacatgttggtgttggaggtgacgatcacgggagtcgggtctatctgggccgaggacttgcatttctggtccacgcgcaccttgcttcctccgagaatggctttggccgactccacgaccttggcggtcatcttcccctcctcccaccagatcaccatcttgtcgacacagtcgttgaagggaaagttctcattggtccagttgacgcagccgtagaagggcgaattc

SEQ ID NO: 147 - protein, 733 aa, Artificial Sequence
  source: /note="Description of Artificial Sequence: Synthetic polypeptide"
MAADGYLPDWLEDNLSEGIREWWDLKPGAPKLKANQQKQDDGRGLVLPGYKYLGPFHGLDKGEPVNAADAAALEHDKAYDQQLKAGDNPYLRYNHADAEFQERLQEDTSFGGNLGRAVFQAKKRVLEPLGLVEEGAKTAPGKKRPLESPQEPDSSSGIGKKGKQPAKKRLNFEEDTGAGDGPPEGSDTSAMSSDIEMRAAPGGNAVDAGQGSDGVGNASGDWHCDSTWSEGKVTTTSTRTWVLPTYNNHLYLRLGTTSNSNTYNGFSTPWGYFDFNRFHCHFSPRDWQRLINNNWGLRPKAMRVKIFNIQVKEVTTSNGETTVANNLTSTVQIFADSSYELPYVMDAGQEGSLPPFPNDVFMVPQYGYCGIVTGENQNQTDRNAFYCLEYFPSQMLRTGNNFEMAYNFEKVPFHSMYAHSQSLDRLMNPLLDQYLWHLQSTTSGETLNQGNAATTFGKIRSGDFAFYRKNWLPGPCVKQQRFSKTASQNYKIPASGGNALLKYDTHYTLNNRWSNIAPGPPMATAGPSDGDFSNAQLIFPGPSVTGNTTTSANNLLFTSEGEIAATNPRDTDMFGQIADNNQNATTAPITGNVTAMGVLPGMVWQNRDIYYQGPIWAKIPHADGHFHPSPLIGGFGLKHPPPQIFIKNTPVPANPATTFTAARVDSFITQYSTGQVAVQIEWEIEKERSKRRNPEVQFTSNYGNQSSMLWAPDTTGKYTEPRVIGSRYLTNHL

SEQ ID NO: 148 - protein, 735 aa, Artificial Sequence
  source: /note="Description of Artificial Sequence: Synthetic polypeptide"
MAADGYLPDWLEDTLSEGIRQWWKLKPGPPPPKPNQQHRDDSRGLVLPGYKYLGPFNGLDKGEPVNEADAAALEHDKAYDHQLKQGDNPYLKYNHADAEFQERLQEDTSFGGNLGRAVFQAKKRVLEPLGLVEEAVKTAPGKKRPIEQSPAEPDSSSGIGKSGQQPAKKRLNFGQTGDTESVPDPQPIGEPPAAPSGVGSNTMASGGGAPMADNNEGADGVGNSSGNWHCDSTWMGDRVITTSTRTWALPTYNNHLYKQISSESGATNDNHYFGYSTPWGYFDFNRFHCHFSPRDWQRLINNNWGFRPKKLNFKLFNIQVKEVTQNDGTTTIANNLTSTVQVFTDSEYQLPYVLGSAHQGCLPPFPADVFMIPQYGYLTLNNGSQAVGRSSFYCLEYFPSQMLRTGNNFTFSYTFEDVPFHSSYAHSQSLDRLMNPLIDQYLYYLSKTQGTSGTTQQSRLQFSQAGPSSMAQQAKNWLPGPSYRQQRMSKTANDNNNSEFAWTAATKYYLNGRNSLVNPGPPMASHKDDEEKYFPMHGNLIFGKQGTGTTNVDIESVLITDEEEIRTTNPVATEQYGQVATNHQSQNTTASYGSVDSQGILPGMVWQDRDVYLQGPIWAKIPHTDGHFHPSPLMGGFGLKHPPPQILIKNTPVPANPATTFTPGKFASFITQYSTGQVSVEIEWELQKENSKRWNPEIQYTSNYNKSVNVEFTVDANGVYSEPRPIGTRYLTRNL

SEQ ID NO: 149 - DNA, 3127 bp, Artificial Sequence
  source: /note="Description of Artificial Sequence: Synthetic polynucleotide"
gcggccgcgaattcgcccttcgcagagaccaaagttcaactgaaacgaatcaaccggtttattgattaacatgcaattacagattacgggtgaggtaacgagtgccaatagggcgaggctcagagtaaacaccctggctgtcaacggcaaagtccacaccagtctgcttttcaaagttggaggtgtactgaatctccgggtcccagcgcttgctgttttccttctgcagctcccactcgatttccacgctgacttgtccggtgctgtactgtgtgatgaacgaagcaaacttggcaggagtaaacacctccggaggattagcgggaacgggagtgttcttgatcaggatctgaggaggcggatgtttaagtccaaagccgcccatcaaaggagacgggtgaaagttgccatccgtgtgaggaatcttggcccagatgggaccctgcaggtacacgtcccggttctgccagaccatgccaggtaaggctccctggttgttgacaacttgtgtctgggctgcagtattagccgcttgtaagttgctgctgactatcccgtattcttccgtggctacaggattagtaggacgaatttcttcttcatttgtcattaacacattttccaatgtagttttgttagttgctccagtttttccaaaaatcaggactccgctggatgggaaaaagcggtcctcgtcgtccttgtgagttgccatggcgacgccgggattaaccaacgagtttctgccgttcaggtgatatttggtggcaccagtccaagcaaagttgctgttgttgttttgatccagcgttttggagaccctttgttgccggaagcagggtccaggtaaccaattcttggcttgttcggccatagttgaaggcccgccctggtaaaactgcagttcccgattgccagctgtgcctcctgggtcactctgtgttctggccaggtagtacaagtactggtcgatgaggggattcatcagccggtccaggctctggctgtgtgcgtagctgctgtggaaaggcacgtcctcgaagctgtagctgaactcaaagttgttgcccgttctcagcatctgagaggggaagtactccaggcagtagaaggaggaacgtcccacagactgactgccattgttgagagtcaggtagccgtactgaggaatcatgaagacgtccgccgggaacggaggcaggcagccctggtgcgcagagccgaggacgtacggcagctggtattccgagtccgagaatacctgaatcgtgctggtaaggttattagcgatggtcgtaacgccgtcattcgtcgtgacctccttgacctggatgttgaagagcttgaaccgcagcttcttgggccggaatccccagttgttgttgatgagtcgctgccagtcacgtggtgagaagtggcagtggaatctgttaaagtcaaaatacccccagggggtgctgtagccgaagtaggtgttgtcgttggtactacctgcagtttcactggagatttgctcgtagaggtggttgttgtaggtgggcagggcccaggttcgggtgctggtggtaatgactctgtcgcccagccatgtggaatcgcaatgccaatttcctgaggcattacccactccgtcggcaccttcgttattgtctgccattggtgcgccaccgcctgcagccactgtaccagatcccacactagagggcgctgctggaggttctccgagaggttgagggtcggggactgactctgagtcgccagtctgaccgaaattgagtctctttctggcgggctgctggcccttcttgccgatgcccgtggaggagtcgggggaacgctgaggtgacggctctaccggtctcttctttgcaggagccgtcttagcgccttcctcaaccagaccgagaggttcgagaacccgcttcttggcctggaagactgctcgcccgaggttgcccccaaatgacgtatcttcttgcagacgctcctgaaactcggcgtcggcgtggttataccgcaggtacgggttgtcacccgcattgagctgctggtcgtaggccttgtcgtgctcgagggccgctgcgtccgccgcgttgacgggctcccccttgtcgagtccgttgaagggtccgaggtacttgtagccaggaagcaccagaccccggccgttgtcctgcttttgctggttggctttgggtttcggggctccaggtttcaggtcccaccactcgcgaatgccctcagagaggttgtcctcgagccaatctggaagataaccatcggcagccatacctgatttaaatcatttattgttcaaagatgcagtcatccaaatccacattgaccagatcgcaggcagtgcaagcgtctggcacctttcccatgatatgatgaatgtagcacagtttctgatacgcctttttgacgacagaaacgggtttagattctgacacgggaaagcactctaaacagtctttctgtccgtgagtgaagcagatatttgaattctgattcattctctcgcattgtctgcagggaaacagcatcagattcatgcccacgtgacgagaacatttgttttggtacctgtctgcgtagttgatcgaagcttccgcgtctgacgtcgatggctgcgcaactgactcgcgcacccgtttgggctcacttatatctgcgtcactgggggcgggtcttttcttggctccaccctttttgacgtagaattcatgctccacctcaaccacgtaatcctttgcccaccggaaaaagtctttgacttcctgcttggtgaccttcccaaagtcatgatccagacggcgggtgagttcaaatttgaacatccggtcttgcaacggctgctggtgttcgaaggtcgttgagttcccgtcgatcacggcgcacatgttggtgttggagatgacgatcgcgggagtcgggtctatctgggccgaggacttgcatttctggtccacgcgcaccttgcttcctccgagaatggctttggccgactccacgaccttggcggtcatcttcccctcctcccaccagatcaccatcttgtcgacacagtcgttgaagggaaagttctcattggtccagttgacgcagccgtagaaagggcgaattc

SEQ ID NO: 150 - protein, 728 aa, Artificial Sequence
  source: /note="Description of Artificial Sequence: Synthetic polypeptide"
MAADGYLPDWLEDNLSEGIREWWDLKPGAPKPKANQQKQDDGRGLVLPGYKYLRPFNGLDKGEPVNEADAAALEHDKAYDKQLEQGDNPYLKYNHADAEFQERLQEDTSFGGNLGRAVFQAKKRVLEPLGLVEEVAKTAPGKKRPIESPDSSTGIGKKGQQPAKKKLNFGQTGDSESVPDPQPLGEPPAAPSGLGSGTMAAGGGAPMADNNEGADGVGNASGNWHCDSTWLGDRVITTSTRTWALPTYNNHLYKQISSQSGATNDNHFFSYSTPWGYFDFNRFHCHFSPRDWQRLINNNWGFRPRKLRFKLFNIQVKEVTTNDGVTTIANNLTSTIQVFSDSEYQLPYVLGSAHQGCLPPFPADVFMIPQYGYLTLNNGSQSVGRSSFYCLEYFPSQMLRTGNNFEFSYTFEEVPFHSSYVHSQSLDRLMNPLIDQYLYYLARTQSTTGSTRELQFHQAGPNTMAEQSKNWLPGPCYRQQRLSKNIDSNNNSNFAWTGATKYHLNGRNSLTNPGVAMATNKDDEDQFFPINGVLVFGKTGAANKTTLENVLMTSEEEIKTTNPVATEEYGVVSSNLQSSTAGPQTQTVNSQGALPGMVWQNRDVCLQGPIWAKIPHTDGNFHPSPLMGGFGLKHPPPQILIKNTPVPANPPEVFTPAKFASFITQYSTGQVSVEIEWELQKENSKRWNPEIQYTSNYAKSNNVEFAVNNEGVYTEPRPIGTRYLTRNL

SEQ ID NO: 151 - DNA, 3106 bp, Artificial Sequence
  source: /note="Description of Artificial Sequence: Synthetic polynucleotide"
gcggccgcgaattcgcccttcgcagagaccaaagttcaactgaaacgaatcaaccggtttattgattaacaagtaattacaggttacgggtgaggtaacgggtgccaatggggcgaggctcagtataaaccccttcgttgttgacagcaaattccacattattagacttggcataatttgaggtgtactgaatctctggattccagcgtttgctgttttctttctgcagttcccactcgatctccacgctgacctggccggtgctgtactgcgtgataaatgaggcaaacttggcaggagtaaacacctctggaggattagcaggtaccggggtgtttttgatgagaatttgaggaggcgggtgtttgagtccaaatccgcccatcaggggagacgggtgaaagttgccgtccgtgtgaggaattttggcccagatgggaccctgcaggcacacgtcccggttctgccagaccatgccgggcagagccccctggctgttgacagtctgtgtctggggtccggccgtagacgattgcaggttgctggagaccacaccgtattcttctgtagccacgggattggtggttttgatctcctcctcgctggtcattagcacgttttccagcgttgtcttgttggcagcccccgttttgccaaaaaccagcactccgttgatgggaaagaactggtcctcgtcgtccttgttggtggccatggctacgcccgggttggttaatgaatttctaccattcagatggtatttagtggccccggtccaggcaaagttactgttgttgttgctgtctatgttttttgacagtctctgctgccgataacagggtccgggcagccagttctttgattgctcggccatggtgttgggcccagcctgatggaactgcagctcccttgtggaccccgtagtgctctgggtccgggccaggtagtacaggtactggtcgatgaggggattcatcagccggtctaggctctggctgtgcacatagctgctgtggaaaggcacttcctcaaaggtgtagctgaattcaaagttattgcccgttctcagcatctgagaaggaaagtactccaggcagtagaaggaggaacgtcccacagactgactgccgttgtttagagtcagatatccgtactgaggaatcatgaacacgtccgcagggaacggagggaggcagccctggtgcgcagagccgaggacgtacggcagttggtactccgagtccgagaagacctgaatcgtgctggtaaggttattagcgatggtcgtaacgccgtcgttcgtcgtgacctccttgacctggatgttgaacaacttgaaccgcagctttctgggccggaatccccagttgttgttgatgagtcgctgccagtcacgtggtgagaagtggcagtggaatctgttgaagtcaaaatagccccagggggtgctgtagctgaagaagtggttgtcgttggtagccccgctctgacttgatatctgcttgtagaggtggttgttgtaggtgggcagggcccaggtgcgggtgctggtggtgatgactctgtcgcccagccatgtggaatcgcaatgccaatttccggaggcattacccactccgtcggcgccttcgttattgtctgccattggtgcgccaccgcctgcagccattgtaccagatcccagacctgagggcgcggcgggaggttctccgagaggttgggggtcgggcactgactctgagtcgccagtctgcccaaagttgagcttctttttagcgggctgctggcctttcttgccgatgcccgtggaggagtcgggggattctatgggtctcttctttccaggagccgtcttagcgacttcctcaaccagaccgagaggttcgagaacccgcttcttggcctggaagactgctcgcccgaggttgcccccaaaagacgtatcttcttgaagacgctcctgaaactcggcgtcggcgtggttgtacttgaggtacgggttgtccccctgctcgagctgcttgtcgtaggccttgtcgtgctcgagggccgcggcgtctgcctcgttgaccggctctcccttgtcgagtccgttgaagggtctgaggtacttgtagccaggaagcaccagaccccggccgtcgtcctgcttttgctggttggctttgggtttcggggctccaggtttcaagtcccaccactcgcgaatgccctcagagaggttgtcctcgagccaatctggaagataaccatcggcagccatacctggtttaagtcatttattgctcagaaacacagtcatccaggtccacgttgaccagatcgcaggccgagcaagcaatctcgggagcccgccccagcagatgatgaatggcacagagtttccgatacgtcctctttctgacgaccggttgagattctgacacgccggggaaacattctgaacagtctctggtcccgtgcgtgaagcaaatgttgaaattctgattcactctctcgcatgtcttgcagggaaacagcatctgaagcatgcccgcgtgacgagaacatttgttttggtacctgtcggcaaagtccaccggagctccttccgcgtctgacgtcgatggattcgcgactgaggggcaggcccgcttgggctcgcttttatccgcgtcatcgggggcgggtctcttgttggccccaccctttctgacgtagaacccatgcgccacctcggtcacgtgatcctgcgcccagcggaagaaccttttgacttcctgctttgtcaccttgccaaagttatgctccagacggcgggtgggttcaaatttgaacatccggtcctgcaacggctgctggtgctcgaaggtggcgctgttcccgtcaatcacggcgcacatgttggtgttggaggtgacggtcacgggggtggggtcgatctgggcggacgacttgcacttttggtccacgcgcaccttgctgccgccgagaatggccttggcggactccacgaccttggccgtcatcttgccctcctcccaccagatcaccatcttgtcggcgcaatcgttgaagggaaagttctcattggtccagttgacgcagccgtagaaagggcgaattc

SEQ ID NO: 152 - protein, 728 aa, Artificial Sequence
  source: /note="Description of Artificial Sequence: Synthetic polypeptide"
MAADGYLPDWLEDNLSEGIREWWDLKPGAPKPKANQQKQDDGRGLVLPGYKYLGPFNGLDKGEPVNEADAAALEHDKAYDKQLEQGDNPYLKYNHADAEFQERLQEDTSFGGNLGRAVFQAKKRVLEPLGLVEEGAKTASGKKRPIESPDSSTGIGKKGQQPAKKKLNFGQTGDSESVPDPQPLGEPPAAPSGLGSGTMAAGGGAPMADNNEGADGVGNASGNWHCDSTWLGDRVITTSTRTWALPTYNNHLYKQISSQSGATNDNHFFGYSTPWGYFDFNRFHCHFSPRDWQRLINNNWGFRPRKLRFKLFNIQVKEVTTNDGVTTIANNLTSTIQVFSDSEYQLPYVLGSAHQGCLPPFPADVFMIPQYGYLTLNNGSQSVGRSSFCCLEYFPSQMLRTGNNFEFSYTFEEVPFHSSYAHSQSLDRLMNPLIDQYLYYLARTQSTTGSTRELQFHQAGPNTVAEQSKNWLPGPCYRQQRLSKNIDSNNNSNFAWTGATKYHLNGRNSLTNPGVAMATNKDDEDQFLPINGVLVFGKTGAANKTTLENVLMTSEEEIKTTNPVATEEYGVVSSNLQSSTAGPRTQTVNSQGALPGMVWQNRDVYLQGPIWAEIPHTDGNFHPSPLMGGFGLKHPPPQILIKNTPVPANPPEVFTPAKFASFITQYSTGQVSVEIEWELQKENSKRWNPEIQYTSNYAKSNNVEFAVNNEGVYTEPRPIGTRYLTRNL

SEQ ID NO: 153 - DNA, 3102 bp, Artificial Sequence
  source: /note="Description of Artificial Sequence: Synthetic polynucleotide"
gcggccgcgaattcgcccttcgcagagaccaaagttcaactgaaacgaatcaaccggtttattgattaacaagtaattacaggttacgggtgaggtaacgggtgccaatggggcgaggctcagtataaaccccttcgttgttgacagcaaattccacattattagacttggcataatttgaggtgtactgaatctctggattccagcgtttgctgttttctttctgcagttcccactcgatctccacgctgacctggccggtgctgtactgcgtgataaatgaggcaaacttggcaggagtaaacacctctggaggattagcaggtaccggggtgtttttgatgagaatttgaggaggcgggtgtttgagtccaaatccgcccatcaggggagacgggtgaaagttgccgtccgtgtgaggaatttcggcccagatgggaccctgcaggtacacgtcccggttctgccagaccatgccgggcagagccccctggctgttgacagtctgtgtccggggtccggccgtagacgattgcaggttgctggagaccacaccgtattcttctgtagccacgggattggtggttttgatctcctcctcgctggtcattagcacgttttccagcgttgtcttgttggcagcccccgttttgccaaaaaccagcactccgttgatgggaaggaactggtcctcgtcgtccttgttggtggccatggctacgcccgggttggttaatgaatttctaccattcagatggtatttagtggccccggtccaggcaaagttactgttgttgttgctgtctatgttttttgacagtctctgctgccgataacagggtccgggcagccagttctttgattgctcggccacggtgttgggcccagcctgatggaactgcagctcccttgtggaccccgtagtgctctgggtccgggccaggtagtacaggtactggtcgatgaggggattcatcagccggtccaggctctggctgtgcgcatagctgctgtggaaaggcacttcctcaaaggtgtagctgaattcaaagttattgcccgttctcagcatctgagaaggaaagtactccaggcagcagaaggaggaacgtcccacagactgactgccgttgtttagagtcagatatccgtactgaggaatcatgaacacgtccgcagggaacggagggaggcagccctggtgcgcagagccgaggacgtacggcagttggtactccgagtccgagaagacctgaatcgtgctggtaaggttattagcgatggtcgtaacgccgtcgttcgtcgtgacctccttgacctggatgttgaacaacttgaaccgcagctttctgggccggaatccccagttgttgttgatgagtcgctgccagtcacgtggtgagaagtggcagtggaatctgttgaagtcaaaatagccccagggggtgctgtagccgaagaagtggttgtcgttggtagccccgctctgacttgatatctgcttgtagaggtggttgttgtaggtgggcagggcccaggtgcgggtgctggtggtgatgactctgtcgcccagccatgtggaatcgcaatgccaatttccggaggcattacccactccgtcggcgccttcgttattgtctgccattggtgcgccaccgcctgcagccattgtaccagatcccagacctgagggcgcggcgggaggttctccgagaggttgggggtcgggcactgactctgagtcgccagtctgcccaaagttgagcttctttttagcgggctgctggcctttcttgccgatgcccgtggaggagtcgggggattctatgggtctcttctttccggaagccgtcttagcgccttcctcaaccagaccgagaggttcgagaacccgcttcttggcctggaagactgctcgcccgaggttgcccccaaaagacgtatcttcttgaagacgctcctgaaactcggcgtcggcgtggttgtacttgaggtacgggttgtccccctgctcgagctgcttgtcgtaggccttgtcgtgctcgagggccgcggcgtctgcctcgttgaccggctctcccttgtcgagtccgttgaagggtccgaggtacttgtagccaggaagcaccagaccccggccgtcgtcctgcttttgctggttggctttgggtttcggggctccaggtttcaagtcccaccactcgcgaatgccctcagagaggttgtcctcgagccaatctggaagataaccatcggcagccatacctggtttaagtcatttattgctcagaaacacagtcatccaggtccacgttgaccagatcgcaggccgagcaagcaatctcgggagcccgccccagcagatgatgaatggcacagagtttccgatacgtcctctttctgacgaccggttgagattctgacacgccggggaaacattctgaacagtctctggtcccgtgcgtgaagcaaatgttgaaattctgattcattctctcgcatgtcttgcagggaaacagcatctgaagcatgcccgcgtgacgagaacatttgttttggtacctgtcggcaaagtccaccggagctccttccgcgtctgacgtcgatggatccgcgactgaggggcaagcccgcttgggctcgcttttatccgcgtcatcgggggcgggtctcttgttggctccaccctttctgacgtagaactcatgcgccacctcggtcacgtgatcctgcgcccagcggaagaactctttgacttcctgctttgtcaccttgccaaagtcatgctccagacggcgggtgagttcaaatttgaacatccggtcttgtaacggctgctggtgctcgaaggtggtgctgttcccgtcaatcacggcgcacatgttggtgttggaagtgacgatcacgggggtgggatcgatctgggcggacgacttgcacttttggtccacgcgcaccttgctgccgccgagaatggccttggcggactccacgaccttggccgtcatcttgccctcctcccaccagatcaccatcttgtcgacgcaatcgttgaagggaaagttctcattggtccagttgacgcagccgaagggcgaattc

SEQ ID NO: 154 - protein, 728 aa, Artificial Sequence
  source: /note="Description of Artificial Sequence: Synthetic polypeptide"
MAADGYLPDWLEDNLSEGIREWWDLKPGAPKPKANQQKQDDGRGLVLPGYRYLGPFNGLDKGEPVNEADAAALEHDKAYDKQLEQGDNPYLKYNHADAEFQERLQEDTSFGGNLGRAVFQAKKRVLEPLGLVEEGAKTAPGKKRPIESPDSSTGIGKNGQPPAKKKLNFGQTGDSESVPDPQPLGEPPAAPSGLGSGTMAAGGGAPMADNNEGADGVGNASGNWHCDSTWLGDRVITTSTRTWALPTYNNHLYKQISSQSGATNDNHFFGYSTPWGYFDFNRFHCHFSPRDWQRLINNNWGFRPRKLRFKLFNIQVKEVTTNDGVTTIANNLTSTIQVFSDSEYQLPYVLGSAHQGCLPPFPADVFMIPQYGYLTLNNGSQSVGRSSFYCLEYFPSQMLRTGNNFEFSYTFEEVPFHSSYAHSQSLDRLMNPLIDQYLYYLARTQSTTGSTRELQFHQAGPNTMAEQSKNWLPGPCYRQQRLSKNIDSNNNSNFAWTGATKYHLNGRNSLTNPGVAMATNKDDEDQFFPINGVLVFGKTGAANKTTLENVLMTSEEEIKTTNPVATEEYGVVSSNLQSSTAGPQTQTVNSQGALPGMVWQNRDVYLQGPIWAKIPHTDGNFHPSPLMGGFGLKHPPPQILIKNTPVPANPPEVFTPAKFASFITQYSTGQVSVEIEWELQKENSKRWNPEIQYTSNYAKSNNVEFAVNNEGVYTEPRPIGTRYLTRNL

SEQ ID NO: 155 - protein, 728 aa, Artificial Sequence
  source: /note="Description of Artificial Sequence: Synthetic polypeptide"
MAADGYLPDWLEGNLSEGIREWWDLKPGAPKPKANQQKQDDGRGLVLPGYRYLGPFNGLDKGEPVNEADAAALEHDKAYDKQLEQGDNPYLKYNHADAEFQERLQEDTSFGGNLGRAVFQAKKRVLEPLGLVEEGAKTAPGKKRPIESPDSSTGIGKNGQPPAKKKLNFGQTGDSESVPDPQPLGEPPAAPSGLGSGTMAAGGGAPMADNNEGADGVGNASGNWHCDSTWLGDRVITTSTRTWALPTYNNHLYKQISSQSGATNDNHFFGYSTPWGYFDFNRFHCHFSPRDWQRLINNNWGFRPRKLRFKLFNIQVKEVTTNDGVTTIANNLTSTIQVFSDSEYQLPYVLGSAHQGCLPPFPADVFMIPQYGYLTLNNGSQSVGRSSFYCLEYFPSQMLRTGDNFEFSYTFEEVPFHSSYAHSQSLDRLMNPLIDQYLYYLARTQSTTGSTRELQFHQAGPNTMAEQSKNWLPGPCYRQQRLSKNIDSNNNSNFAWTGATKYHLNGRNSLTNPGVAMATNKDDEDQFFPINGVLVFGKTGAANKTTLENVLMTSEEEIKTTNPVATEEYGVVSSNLQSSTAGPQTQTVNSQGALPGMVWQNRDVYLQGPIWAKIPHTDGNFHPSPLMGGFGLKHPPPQILIKNTPVPANPPEVFTPAKFASFITQYSTGQVSVEIEWELQKENSKRWNPEIQYTSNYAKSNNVEFAVNNEGVYTEPRPIGTRYLTRNL

SEQ ID NO: 156 - DNA, 3106 bp, Artificial Sequence
  source: /note="Description of Artificial Sequence: Synthetic polynucleotide"
gcggccgcgaattcgcccttcgcagagaccaaagttcaactgaaacgaatcagccggtttattgattaacaagtaattacaggttacgggtgaggtaacgggtgccaatggggcgaggctcagtataaaccccttcgttgttgacagcaaattccacattattagacttggcataatttgaggtgtactgaatctctggattccagcgtttgctgttttctttctgcagttcccactcgatctccacgctgacctggccggtgctgtactgcgtgataaatgaggcaaacttggcaggagtaaacacctctggaggattagcaggtaccggggtgtttttgatgagaatttgaggaggcgggtgtttgagtccaaatccgcccatcaggggagacgggtgaaagttgccgtccgtgtgaggaattttggcccagatgggaccctgcaggtacacgtcccggttctgccagaccatgccgggcagagccccctggctgttgacagtctgtgtctggggtccggccgtagacgattgcaggttgctggagaccacaccgtattcttctgtagccacgggattggtggttttgatctcctcctcgctggtcattagcacgttttccagcgttgtcttgttggcagcccccgttttgccaaaaaccagcactccgttgatgggaaagaactggtcctcgtcgtccttgttggtggccatggctacgcccgggttggttaatgaatttctaccattcagatggtatttagtggccccggtccaggcaaagttactgttgttgttgctgtctatgttttttgacagtctctgctgccgataacagggtccgggcagccagttctttgattgctcggccatggtgttgggcccagcctgatggaactgcagctcccttgtggaccccgtagtgctctgggtccgggccaggtagtacaggtactggtcgatgaggggattcatcagccggtccaggctctggctgtgcgcatagctgctgtggaaaggcacttcctcaaaggtgtagctgaattcaaagttatcgcccgttctcagcatctgagaaggaaagtactccaggcagtagaaggaggaacgtcccacagactgactgccgttgtttagagtcagatatccgtactgaggaatcatgaacacgtccgcagggaacggagggaggcagccctggtgcgcagagccgaggacgtacggcagttggtactccgagtccgagaagacctgaatcgtgctggtaaggttattagcgatggtcgtaacgccgtcgttcgtcgtgacctccttgacctggatgttgaacaacttgaaccgcagctttctgggccggaatccccagttgttgttgatgagtcgctgccagtcacgtggtgagaagtggcagtggaatctgttgaagtcaaaatagccccagggggtgctgtagccgaagaagtggttgtcgttggtagccccgctctgacttgatatctgcttgtagaggtggttgttgtaggtgggcagggcccaggtgcgggtgctggtggtgatgactctgtcgcccagccatgtggaatcgcaatgccaatttccggaggcattacccactccgtcggcgccttcgttattgtctgccattggtgcgccaccgcctgcagccattgtaccagatcccagacctgagggcgcggcgggaggttctccgagaggttgggggtcgggcactgactctgagtcgccagtctgcccaaagttgagcttctttttagcgggcggctggccgttcttgccgatgcccgtggaggagtcgggggattctatgggtctcttctttccaggagccgtcttagcgccttcctcaaccagaccgagaggttcgagaacccgcttcttggcctggaagactgctcgcccgaggttgcccccaaaagacgtatcttcttgaagacgctcctgaaactcggcgtcggcgtggttgtacttgaggtacgggttgtccccctgctcgagctgcttgtcgtaggccttgtcgtgctcgagggccgcggcgtctgcctcgttgaccggctctcccttgtcgagtccgttgaagggtccgaggtacctgtagccaggaagcaccagaccccggccgtcgtcctgcttttgctggttggctttgggtttcggggctccaggtttcaagtcccaccactcgcgaatgccctcagagaggttgccctcgagccaatctggaagataaccatcggcagccatacctggtttaagtcatttattgctcagaaacacagtcatccaggtccacgttggccagatcgcaggccgagcaagcaatctcgggagcccgccccagcagatgatgaatggcacagagtttccgatacgtcctctttctgacgaccggttgagattctgacacgccggggaaacattctgaacagtctctggtcccgtgcgtgaagcaaatgttgaaattctgattcattctctcgcatgtcttgcaggggaacagcatctgaagcatgcccgcgtgacgagaacatttgttttggtacctgtcggcaaagtccaccggagctccttccgcgtctgacgtcgatggatccgcgactgaggggcaggcccgcttgggctcgcttttatccgcgtcatcgggggcgggtctcttgttggctccaccctttctgacgtagaactcatacgccacctcggtcacgtgatcctgcgcccagcggaagaactctttgacttcctgctttgtcaccttgccaaagtcatgctccagacggcgggtgagttcaaatttgaacatccggtcttgtaacggctgctggtgctcgaaggtggtgctgttcccgtcaatcacggcgcacatgttggtgttggaagtgacgatcacgggggtgggatcgatctgggcggacgacttgcacttttggtccacgcgcaccttgctgccgccgagaatggccttggcggactccacgaccttggccgtcatcctgccctcctcccaccagatcaccatcttgtcgacgcaatcgttgaagggaaagttctcattggtccagttgacgcagccgtagaaagggcgaattc

SEQ ID NO: 157 - protein, 728 aa, Artificial Sequence
  source: /note="Description of Artificial Sequence: Synthetic polypeptide"
MAADGYLPDWLEDNLSEGIREWWDLKPGAPKPKANQQKQDDGRGLVLPGYKYLGPFNGLDKGEPVNEADAAALEHDKAYDKQLEQGDNPYLKYNHADAEFQERLQEDTSFGGNLGRAVFQAKKRVLEPLGLVEEGAKTAPGKKRPIESPDSSTGIGKKGQQPAKKKLNFGQTGDSESVPDPQPLGEPPAAPSGLGSGTMAAGGGAPMADNNEGADGVGNASGNWHCDSTWLGDRVITTSTRTWALPTYNNHLYKQISSQSGATNDNHFFGYSTPWGYFDFNRFHCHFSPRDWQRLINNNWGFRPRKLRFKLFNIQVKEVTTNDGVTTIANNLTSTIQVFSDSEYQLPYVLGSAHQGCLPPFPADVFMIPQYGYLTLNNGSQSMGRSSFYCLEYFPSQMLRTGNNFEFSYTFEEVPFHSSYAHSQSLDRLMNPLIDQYLYYLARTQSTTGSTRELQFHQAGPNTMAEQSKNWLPGPCYRQQRLSKNIDSNNNSNFAWTGATKYHLNGRNSLTNPGVAMATNKDDEGQFFPINGVLVFGKTGAANKTTLENVLMTSEEEIKTTNPVATEEYGVVSSNLQSSTAGPQTQTVNSQGALPGMVWQNRDVYLQGPIWAKIPHTDGNFHPSPLMGGFGLKHPPPQILIKNTPVPANPPGVFTPALFASFITQYSTGQVSVEIEWELQKENSKRWNPEIQYTSNYAKSNNVEFAVNNEGVYTEPRPIGTRYLTRNL

SEQ ID NO: 158 - DNA, 3098 bp, Artificial Sequence
  source: /note="Description of Artificial Sequence: Synthetic polynucleotide"
gaattcgcccttcgcagagaccaaagttcaactgaaacgaatcaaccggtttattgattaacaagtaattacaggttacgggtgaggtaacgggtgccaatggggcgaggctcagtataaaccccttcgttgttgacagcaaattccacattattagacttggcataatttgaggtgtactgaatctctggattccagcgtttgctgttttctttctgcagttcccactcgatctccacgctgacctggccggtgctgtactgcgtgataaatgaggcaaactaggcaggagtaaacacccctggaggattagcaggtaccggggtgtttttgatgagaatttgaggaggcgggtgtttgagtccaaatccgcccatcaggggagacgggtgaaagttgccgtccgtgtgaggaattttggcccagatgggaccctgcaggtacacgtcccggttctgccagaccatgccgggcagagccccctggctgttgacagtctgtgtctggggtccggccgtagacgattgcaggttgctggagaccacaccgtattcttctgtagccacgggattggtggttttgatctcctcctcgctggtcattagcacgttttccagcgttgtcttgttggcagcccccgttttgccaaaaaccagcactccgttgatgggaaagaactggccctcgtcgtccttgttggtggccatggctacgcccgggttggttaatgaatttctaccattcagatggtatttagtggccccggtccaggcaaagttactgttgttgttgctgtctatgttttttgacagtctctgctgccgataacagggtccgggcagccagttctttgattgctcggccatggtgttgggcccagcctgatggaactgcagctcccttgtggaccccgtagtgctctgggtccgggccaggtagtacaggtactggtcgatgaggggattcatcagccggtccaggctctggctgtgcgcatagctgctgtggaaaggcacttcctcaaaggtgtagctgaattcaaagttattgcccgttctcagcatctgagaaggaaagtactccaggcagtagaaggaggaacgtcccatagactgactgccgttgtttagagtcagatatccgtactgaggaatcatgaacacgtccgcagggaacggagggaggcagccctggtgcgcagagccgaggacgtacggcagttggtactccgagtccgagaagacctgaatcgtgctggtaaggttattagcgatggtcgtaacgccgtcgttcgtcgtgacctccttgacctggatgttgaacaacttgaaccgcagctttctgggccggaatccccagttgttgttgatgagtcgctgccagtcacgtggtgagaagtggcagtggaatctgttgaagtcaaaatagccccagggggtgctgtagccgaagaagtggttgtcgttggtagccccgctctgacttgatatctgcttgtagaggtggttgttgtaggtgggcagggcccaggtgcgggtgctggtggtgatgactctgtcgcccagccatgtggaatcgcaatgccaatttccggaggcattacccactccgtcggcgccttcgttattgtctgccattggtgcgccaccgcctgcagccattgtaccagatcccagacctgagggcgcggcgggaggttctccgagaggttgggggtcgggcactgactctgagtcgccagtctgcccaaagttgagcttctttttagcgggctgctggcctttcttgccgatgcccgtggaggagtcgggggattctatgggtctcttctttccaggagccgtcttagcgccttcctcaaccagaccgagaggttcgagaacccgcttcttggcctggaagactgctcgcccgaggttgcccccaaaagacgtatcttcttgaagacgctcctgaaactcagcgtcggcgtggttgtacttgaggtacgggttgtccccctgctcgagctgcttgtcgtaggccttgtcgtgctcgagggccgcggcgtctgcctcgttgaccggctctcccttgtcgagtccgttgaagggtccgaggtacttgtagccaggaagcaccagaccccggccgtcgtcctgcttttgctggttggctttgggtttcggggctccaggtttcaagtcccaccactcgcgaatgccctcagagaggttgtcctcgagccaatctggaagataaccatcggcagccatacctggtttaagtcatttattgctcagaaacacagtcatccaggtccacgttgaccagatcgcaggccgagcaagcaatctcgggagcccgccccagcagatgatgaatggcacagagtttccgatacgtcctctttctgacgaccggttgagattctgacacgccggggaaacattctgaacagtctctggtcccgtgcgtgaagcaaatgttgaaattctgattcattctctcgcatgtcttgcagggaaacagcatctgaagcatgcccgcgtgacgagaacatttgttttggtacctgtcggcaaagtccaccggagctccttccgcgtctgacgtcgatggatccgcgactgaggggcaggcccgcttgggctcgcttttatccgcgtcatcgggggcgggcctcttgttggctccaccctttctgacgtagaactcatgcgccacctcggtcacgtgatcctgcgcccagcggaagaactctttgacttcctgctttgtcaccttgccaaagtcctgctccagacggcgggtgagttcaaatttgaacatccggtcttgtaacggctgctggtgctcgaaggtggtgctgttcccgtcaatcacggcgcacatgttggtgttggaagtgacgatcacgggggtgggatcgatctgggcggacgacttgcacttttggtccacgcgcaccttgctgccgccgagaatggccttggcggactccacgaccttggccgtcatcttgccctcctcccaccagatcaccatcttgtcgacgcaatcgttgaagggaaagttctcattggtccagttgacgcagccgtagaaagggcgaattc

SEQ ID NO: 159 - DNA, 2187 bp, Artificial Sequence
  source: /note="Description of Artificial Sequence: Synthetic polynucleotide"
atggctgccgatggttatcttccagattggctcgagggcaacctctctgagggcattcgcgagtggtgggacttgaaacctggagccccgaaacccaaagccaaccagcaaaagcaggacgacggccggggtctggtgcttcctggctacaggtacctcggacccttcaacggactcgacaagggagagccggtcaacgaggcagacgccgcggccctcgagcacgacaaggcctacgacaagcagctcgagcagggggacaacccgtacctcaagtacaaccacgccgacgccgagtttcaggagcgtcttcaagaagatacgtcttttgggggcaacctcgggcgagcagtcttccaggccaagaagcgggttctcgaacctctcggtctggttgaggaaggcgctaagacggctcctggaaagaagagacccatagaatcccccgactcctccacgggcatcggcaagaacggccagccgcccgctaaaaagaagctcaactttgggcagactggcgactcagagtcagtgcccgacccccaacctctcggagaacctcccgccgcgccctcaggtctgggatctggtacaatggctgcaggcggtggcgcaccaatggcagacaataacgaaggcgccgacggagtgggtaatgcctccggaaattggcattgcgattccacatggctgggcgacagagtcatcaccaccagcacccgcacctgggccctgcccacctacaacaaccacctctacaagcagatatcaagtcagagcggggctaccaacgacaaccacttcttcggctacagcaccccctggggctattttgacttcaacagattccactgccacttctcaccacgtgactggcagcgactcatcaacaacaactggggattccggcccagaaagctgcggttcaagttgttcaacatccaggtcaaggaggtcacgacgaacgacggcgttacgaccatcgctaataaccttaccagcacgattcaggtcttctcggactcggagtaccaactgccgtacgtcctcggctctgcgcaccagggctgcctccctccgttccctgcggacgtgttcatgattcctcagtacggatatctgactctaaacaacggcagtcagtctgtgggacgttcctccttctactgcctggagtactttccttctcagatgctgagaacgggcgataactttgaattcagctacacctttgaggaagtgcctttccacagcagctatgcgcacagccagagcctggaccggctgatgaatcccctcatcgaccagtacctgtactacctggcccggacccagagcactacggggtccacaagggagctgcagttccatcaggctgggcccaacaccatggccgagcaatcaaagaactggctgcccggaccctgttatcggcagcagagactgtcaaaaaacatagacagcaacaacaacagtaactttgcctggaccggggccactaaataccatctgaatggtagaaattcattaaccaacccgggcgtagccatggccaccaacaaggacgacgaggaccagttctttcccatcaacggagtgctggtttttggcaaaacgggggctgccaacaagacaacgctggaaaacgtgctaatgaccagcgaggaggagatcaaaaccaccaatcccgtggctacagaagaatacggtgtggtctccagcaacctgcaatcgtctacggccggaccccagacacagactgtcaacagccagggggctctgcccggcatggtctggcagaaccgggacgtgtacctgcagggtcccatctgggccaaaattcctcacacggacggcaactttcacccgtctcccctgatgggcggatttggactcaaacacccgcctcctcaaattctcatcaaaaacaccccggtacctgctaatcctccagaggtgtttactcctgccaagtttgcctcatttatcacgcagtacagcaccggccaggtcagcgtggagatcgagtgggaactgcagaaagaaaacagcaaacgctggaatccagagattcagtacacctcaaattatgccaagtctaataatgtggaatttgctgtcaacaacgaaggggtttatactgagcctcgccccattggcacccgttacctcacccgtaacctgtaa

SEQ ID NO: 160 - protein, 728 aa, Artificial Sequence; identical to SEQ ID NO: 155
  source: /note="Description of Artificial Sequence: Synthetic polypeptide"

SEQ ID NO: 161 - protein, 728 aa, Artificial Sequence
  source: /note="Description of Artificial Sequence: Synthetic polypeptide"
MAADGYLPDWLEDNLSEGIREWWDLKPGAPKPKANQQKQDDGRGLVLPGYRYLGPFNGLDKGEPVNEADAAALEHDKAYDKQLEQGDNPYLKYNHADAEFQERLQEDTSFGGNLGRAVFQAKKRVLEPLGLVEEGAKTAPGKKRPIESPDSSTGIGKNGQPPAKKKLNFGQTGDSESVPDPQPLGEPPAAPSGLGSGTMAAGGGAPMADNNEGADGVGNASGNWHCDSTWLGDRVITTSTRTWALPTYNNHLYKQISSQSGATNDNHFFGYSTPWGYFDFNRFHCHFSPRDWQRLINNNWGFRPRKLRFKLFNIQVKEVTTNDGVTTIANNLTSTIQVFSDSEYQLPYVLGSAHQGCLPPFPADVFMIPQYGYLTLNNGSQSVGRSSFYCLEYFPSQMLRTGDNFEFSYTFEEVPFHSSYAHSQSLDRLMNPLIDQYLYYLARTQSTTGSTRELQFHQAGPNTMAEQSKNWLPGPCYRQQRLSKNIDSNNNSNFAWTGATKYHLNGRNSLTNPGVAMATNKDDEDQFFPINGVLVFGKTGAANKTTLENVLMTSEEEIKTTNPVATEEYGVVSSNLQSSTAGPQTQTVNSQGALPGMVWQNRDVYLQGPIWAKIPHTDGNFHPSPLMGGFGLKHPPPQILIKNTPVPANPPEVFTPAKFASFITQYSTGQVSVEIEWELQKENSKRWNPEIQYTSNYAKSNNVEFAVNNEGVYTEPRPIGTRYLTRNL

SEQ ID NO: 162 - protein, 728 aa, Artificial Sequence; identical to SEQ ID NO: 154
  source: /note="Description of Artificial Sequence: Synthetic polypeptide"

SEQ ID NO: 163 - protein, 728 aa, Artificial Sequence
  source: /note="Description of Artificial Sequence: Synthetic polypeptide"
MAADGYLPDWLEDNLSEGIREWWDLKPGAPKPKANQQKQDDGRGLVLPGYKYLGPFNGLDKGEPVNEADAAALEHDKAYDKQLEQGDNPYLKYNHADAEFQERLQEDTSFGGNLGRAVFQAKKRVLEPLGLVEEGAKTAPGKKRPIESPDSSTGIGKNGQPPAKKKLNFGQTGDSESVPDPQPLGEPPAAPSGLGSGTMAAGGGAPMADNNEGADGVGNASGNWHCDSTWLGDRVITTSTRTWALPTYNNHLYKQISSQSGATNDNHFFGYSTPWGYFDFNRFHCHFSPRDWQRLINNNWGFRPRKLRFKLFNIQVKEVTTNDGVTTIANNLTSTIQVFSDSEYQLPYVLGSAHQGCLPPFPADVFMIPQYGYLTLNNGSQSVGRSSFYCLEYFPSQMLRTGNNFEFSYTFEEVPFHSSYAHSQSLDRLMNPLIDQYLYYLARTQSTTGSTRELQFHQAGPNTMAEQSKNWLPGPCYRQQRLSKNIDSNNNSNFAWTGATKYHLNGRNSLTNPGVAMATNKDDEDQFFPINGVLVFGKTGAANKTTLENVLMTSEEEIKTTNPVATEEYGVVSSNLQSSTAGPQTQTVNSQGALPGMVWQNRDVYLQGPIWAKIPHTDGNFHPSPLMGGFGLKHPPPQILIKNTPVPANPPEVFTPAKFASFITQYSTGQVSVEIEWELQKENSKRWNPEIQYTSNYAKSNNVEFAVNNEGVYTEPRPIGTRYLTRNL

SEQ ID NO: 164 - protein, 728 aa, Artificial Sequence
  source: /note="Description of Artificial Sequence: Synthetic polypeptide"
MAADGYLPDWLEDNLSEGIREWWDLKPGAPKPKANQQKQDDGRGLVLPGYKYLGPFNGLDKGEPVNEADAAALEHDKAYDKQLEQGDNPYLKYNHADAEFQERLQEDTSFGGNLGRAVFQAKKRVLEPLGLVEEGAKTAPGKKRPIESPDSSTGIGKKGQQPAKKKLNFGQTGDSESVPDPQPLGEPPAAPSGLGSGTMAAGGGAPMADNNEGADGVGNASGNWHCDSTWLGDRVITTSTRTWALPTYNNHLYKQISSQSGATNDNHFFGYSTPWGYFDFNRFHCHFSPRDWQRLINNNWGFRPRKLRFKLFNIQVKEVTTNDGVTTIANNLTSTIQVFSDSEYQLPYVLGSAHQGCLPPFPADVFMIPQYGYLTLNNGSQSVGRSSFYCLEYFPSQMLRTGNNFEFSYTFEEVPFHSSYAHSQSLDRLMNPLIDQYLYYLARTQSTTGSTRELQFHQAGPNTMAEQSKNWLPGPCYRQQRLSKNIDSNNNSNFAWTGATKYHLNGRNSLTNPGVAMATNKDDEDQFFPINGVLVFGKTGAANKTTLENVLMTSEEEIKTTNPVATEEYGVVSSNLQSSTAGPQTQTVNSQGALPGMVWQNRDVYLQGPIWAKIPHTDGNFHPSPLMGGFGLKHPPPQILIKNTPVPANPPEVFTPAKFASFITQYSTGQVSVEIEWELQKENSKRWNPEIQYTSNYAKSNNVEFAVNNEGVYTEPRPIGTRYLTRNL

SEQ ID NO: 165 - DNA, 2215 bp, Artificial Sequence
  source: /note="Description of Artificial Sequence: Synthetic polynucleotide"
atggctgccgatggttatcttccagattggctcgaggacactctctctgaaggaataagacagtggtggaagctcaaacctggcccaccaccaccaaagcccgcagagcggcataaggacgacagcaggggtcttgtgcttcctgggtacaagtacctcggacccttcaacggactcgacaagggagagccggtcaacgaggcagacgccgcggccctcgagcacgacaaagcctacgaccggcagctcgacagcggagacaacccgtacctcaagtacaaccacgccgacgccgagttccaggagcggctcaaagaagatacgtcttttgggggcaacctcgggcgagcagtcttccaggccaaaaagaggcttcttgaacctcttggtctggttgaggaagcggctaagacggctcctggaaagaagaggcctgtagagcactctcctgtggagccagactcctcctcgggaaccggaaaggcgggccagcagcctgcaagaaaaagattgaattttggtcagactggagacgcagactcagtcccagaccctcaaccaatcggagaacctcccgcagccccctcaggtgtgggatctcttacaatggctgcaggcggtggcgcaccaatggcagacaataacgagggcgccgacggagtgggtaattcctcgggaaattggcattgcgattccacatggatgggcgacagagtcatcaccaccagcacccgaacctgggccctgcccacctacaacaaccacctctacaagcaaatctccaacagcacatctggaggatcttcaaatgacaacgcctacttcggctacagcaccccctgggggtattttgactttaacagattccactgccacttttcaccacgtgactggcagcgactcatcaacaacaactggggattccggcccaagagactcagcttcaagctcttcaacatccaggtcaaggaggtcacgcagaatgaaggcaccaagaccatcgccaataacctcaccagcaccatccaggtgtttacggactcggagtaccagctgccgtacgttctcggctctgcccaccagggctgcctgcctccgttcccggcggacgtgttcatgattccccagtacggctacctaacactcaacaacggtagtcaggccgtgggacgctcctccttctactgcctggaatactttccttcgcagatgctgagaaccggcaacaacttccagtttacttacaccttcgaggacgtgcctttccacagcagctacgcccacagccagagcttggaccggctgatgaatcctctgattgaccagtacctgtactacttgtctcggactcaaacaacaggaggcacgacaaatacgcagactctgggcttcagccaaggtgggcctaatacaatggccaatcaggcaaagaactggctgccaggaccctgttaccgccagcagcgagtatcaaagacatctgcggataacaacaacagtgaatactcgtggactggagctaccaagtaccacctcaatggcagagactctctggtgaatccgggcccggccatggcaagccacaaggacgatgaagaaaagtttttttcctcagagcggggttctcatctttgggaagcaaggctcagagaaaacaaatgtggacattgaaaaggtcatgattacagacgaagaggaaatcaggacaaccaatcccgtggctacggagcagtatggttctgtatctaccaacctccagagaggcaacagacaagcagctaccgcagatgtcaacacacaaggcgttcttccaggcatggtctggcaggacagagatgtgtaccttcaggggcccatctgggcaaagattccacacacggacggacattttcacccctctcccctcatgggtggattcggacttaaacaccctccgcctcagatcctgatcaagaacacgcctgtacctgcggatcctccgaccaccttcaaccagtcaaagctgaactctttcatcacccagtattctactggccaagtcagcgtggagatcgagtgggagctgcagaaggaaaacagcaagcgctggaaccccgagatccagtacacctccaactactacaaatctacaagtgtggactttgctgttaatacagaaggcgtgtactctgaaccccgccccattggcacccgttacctcacccgtaatctgtaa

SEQ ID NO: 166 - protein, 737 aa, Artificial Sequence
  source: /note="Description of Artificial Sequence: Synthetic polypeptide"
MAADGYLPDWLEDTLSEGIRQWWKLKPGPPPPKPAERHKDDSRGLVLPGYKYLGPFNGLDKGEPVNEADAAALEHDKAYDRQLDSGDNPYLKYNHADAEFQERLKEDTSFGGNLGRAVFQAKKRLLEPLGLVEEAAKTAPGKKRPVEHSPVEPDSSSGTGKAGQQPARKRLNFGQTGDADSVPDPQPIGEPPAAPSGVGSLTMAAGGGAPMADNNEGADGVGNSSGNWHCDSTWMGDRVITTSTRTWALPTYNNHLYKQISNSTSGGSSNDNAYFGYSTPWGYFDFNRFHCHFSPRDWQRLINNNWGFRPKRLSFKLFNIQVKEVTQNEGTKTIANNLTSTIQVFTDSEYQLPYVLGSAHQGCLPPFPADVFMIPQYGYLTLNNGSQAVGRSSFYCLEYFPSQMLKTGNNFQFTYTFEDVPFHSSYAHSQSLDRLMNPLIDQYLYYLSRTQTTGGTTNTQTLGFSQGGPNTMANQAKNWLPGPCYRQQRVSKTSADNNNSEYSWTGATKYHLNGRDSLVNPGPAMASHKDDEEKFFPQSGVLIFGKQGSEKTNVDIEKVMITDEEEIRTTNPVATEQYGSVSTNLQRGNRQAATADVNTQGVLPGMVWQDRDVYLQGPIWAKIPHTDGHFHPSPLMGGFGLKHPPPQILIKNTPVPADPPTTFNQSKLNSFITQYSTGQVSVEIEWELQKENSKRWNPEIQYTSNYYKSTSVDFAVNTEGVYSEPRPIGTRYLTRNL

SEQ ID NO: 167 - protein, 737 aa, Artificial Sequence
  source: /note="Description of Artificial Sequence: Synthetic polypeptide"
MAADGYLPDWLEDTLSEGIRQWWKLKPGPPPPKPAERHKDDSRGLVLPGYKYLGPFNGLDKGEPVNEADAAALEHDKAYDRQLDSGDNPYLKYNHADAEFQERLKEDTSFGGNLGRAVFQAKKRLLEPLGLVEEAAKTAPGKKRPVEHSPVEPDSSSGTGKAGQQPARKRLNFGQTGDADSVPDPQPIGEPPAAPSGVGSLTMAAGGGAPMADNNEGADGVGNSSGNWHCDSTWMGDRVITTSTRTWALPTYNNHLYKQISNSTSGGSSNDNAYFGYSTPWGYFDFNRFHCHFSPRDWQRLINNNWGFRPKRLSFKLFNIQVKEVTQNEGTKTIANNLTSTIQVFTDSEYQLPYVLGSAHQGCLPPFPADVFMIPQYGYLTLNNGSQAVGRSSFYCLEYFPSQMLKTGNNFQFTYTFEDVPFHSSYAHSQSLDRLMNPLIDQYLYYLSRTQTTGGTTNTQTLGFSQGGPNTMANQAKNWLPGPCYRQQRVSKTSADNNNSEYSWTGATKYHLNGRDSLVNPGPAMASHKDDEEKFFPQSGVLIFGKQGSEKTNVDIEKVMITDEEEIRTTNPVATEQYGSVSTNLQQGNTQAATADVNTQGVLPGMVWQDRDVYLQGPIWAKIPHTDGHFHPSPLMGGFGLKHPPPQILIKNTPVPADPPTTFNQSKLNSFITQYSTGQVSVEIEWELQKENSKRWNPEIQYTSNYYKSTSVDFAVNTEGVYSEPRPIGTRYLTRNL

SEQ ID NO: 168 - protein, 737 aa, Artificial Sequence
  source: /note="Description of Artificial Sequence: Synthetic polypeptide"
MAADGYLPDWLEDTLSEGIRQWWKLKPGPPPPKPAERHKDDSRGLVLPGYKYLGPFNGLDKGEPVNEADAAALEHDKAYDRQLDSGDNPYLKYNHADAEFQERLKEDTSFGGNLGRAVFQAKKRLLEPLGLVEEAAKTAPGKKRPVEHSPVEPDSSSGTGKAGQQPARKRLNFGQTGDADSVPDPQPIGEPPAAPSGVGSLTMAAGGGAPMADNNEGADGVGNSSGNWHCDSTWMGDRVITTSTRTWALPTYNNHLYKQISNSTSGGSSNDNAYFGYSTPWGYFDFNRFHCHFSPRDWQRLINNNWGFRPKRLSFKLFNIQVKEVTQNEGTKTIANNLTSTIQVFTDSEYQLPYVLGSAHQGCLPPFPADVFMIPQYGYLTLNNGSQAVGRSSFYCLEYFPSQMLRTGNNFQFTYTFEDVPFHSSYAHSQSLDRLMNPLIDQYLYYLSRTQTTGGTTNTQTLGFSQGGPNTMANQAKNWLPGPCYRQQRVSKTSADNNNSEYSWTGATKYHLNGRDSLVNPGPAMASHKDDEEKFFPQSGVLIFGKQGSEKTNVDIEKVMITDEEEIRTTNPVATEQYGSVSTNLQQGNTQAATADVNTQGVLPGMVWQDRDVYLQGPIWAKIPHTDGHFHPSPLMGGFGLKHPPPQILIKNTPVPADPPTTFNQSKLNSFITQYSTGQVSVEIEWELQKENSKRWNPEIQYTSNYYKSTSVDFAVNTEGVYSEPRPIGTRYLTRNL

SEQ ID NO: 169 - protein, 729 aa, Artificial Sequence
  source: /note="Description of Artificial Sequence: Synthetic polypeptide"
MAADGYLPDWLEDNLSEGIREWWDLKPGAPKPKANQQKQDDGRGLVLPGYKYLGPFNGLDKGEPVNAADAAALEHDKAYDQQLKAGDNPYLRYNHADAEFQERLQEDTSFGGNLGRAVFQAKKRVLEPLGLVEEGAKTAPGKKRPIDSPDSSTGIGKKGQQPAKKKLNFGQTGDSESVPDPQPLGEPPAAPSSVGSGTMAAGGGAPTADNNEGADGVGNASGNWHCDSTWLGDRVITTSTRTWALPTYNNHLYKQISSSSSGATNDNHYFGYSTPWGYFDFNRFHCHFSPRDWQRLINNNWGFRPKKLRFKLFNIQVKEVTTNDGVTTIANNLTSTVQVFSDSEYQLPYVLGSAHQGCLPPFPADVFMIPQYGYLTLNNGSQSVGRSSFYCLEYFPSQMLRTGNNFEFSYSFEDVPFHSSYAHSQSLDRLMNPLIDQYLYYLARTQSTTGSTRELQFHQAGPNTMAEQSKNWLPGPCYRQQRLSKNLDFNNNSNFAWTAATKYHLNGRNSLTNPGIPMATNKDDEDQFFPINGVLVFGKTGAANKTTLENVLMTSEEEIKTTNPVATEEYGVVSSNLQSSTAGPQSQTINSQGALPGMVWQNRDVYLQGPIWAKIPHTDGNFHPSPLMGGFGLEHPPPQILIKNTPVPANPPEVFTPAKFASFITQYSTGQVSVEIEWELQKENSKRWNPEIQYTSNYAKSNNVEFAVNPDGVYTEPRPIGTRYLTRNL

SEQ ID NO: 170 - DNA, 3075 bp, Artificial Sequence
  source: /note="Description of Artificial Sequence: Synthetic polynucleotide"
tgagaactttcctttcaacgattgcgtcggacaagatggtgatctggtgggaggaggggaagatgaccgccaaggtcgtggagtcggccaaagccattcttggaggaagcaaggtgcgtgtggaccagaaatgcaagtcctcggcccagatagacccgactcccgtgatcgtcacctccaacaccaacatgtgcgccgtgattgacgggaactcaacgaccttcgagcaccagcagccgttgcaagaccggatgttcaaatttgaacttacccgccgtctggatcatgactttggaaaggtcaccaagcaggaagtgaaagactttttccggtgggcaaaggatcacgtggttgaggtggagcatgaattctacgtcaaaaagggtggagctaagaaaagacccgcccccagtgacgcagatataagtgagcccaaacgggcgcgcgagtcagttgcgcagccatcaacgtcagacgcggaagcttcgatcaactacgcggacaggtaccaaaaacaaatgttctcgtcacgtgggcatgaatctgatgctgtttccctgcagacaatgcgagagaatgaatcagaattcaaatatctgcttcactcacggacagaaagactgtttagagtgctttcccgtgtcagaatctcaacccgtttctgtcgtcaaaaaggcgtatcagaaactgtgctacattcatcatatcatgggaaaggtgccagacgcttgcactgcctgcgatctggtcaatgtggatttggatgactgcatctctgaacaataaatgatttaaatcaggtatggctgccgatggttatcctccagattggctcgaggacactctctctgaagggataagacagtggtggaagctcaaacctggcccaccaccaccaaagcccgcagagcggcataaggacgacagcaggggtcttgtgcttcctgggtacaagtacctcggacccttcaacggactcgacaagggggagccggtcaacgaggcagacgccgcggccctcgagcacgacaaggcctacgaccggcagctcgacagcggagacaacccgtacctcaagtacaaccacgccgacgcagagtttcaggagcgccttaaagaagatacgtcttttgggggcaacctcggacgagcagtcttccaggcgaaaaagagggttcttgaacctctgggcctggttgaggaacctgttaagacggctccgggaaaaaagaggccggtagagcactctcctgtggagccagactcctcctcgggaaccggaaaagcgggccagcggcctgcaagaaaaagattaaattttggtcagactggagacgcagactccgtacctgacccccagcctctcggacagccaccagcagccccctctggtctgggatctactacaatggctacaggcagtggcgcaccaatggcagacaataacgagggtgccgatggagtgggtaattcctcaggaaattggcattgcgattcccaatggctgggcgacagagtcatcaccaccagcacccgaacctgggccctgcccacatacaacaaccacctctacaagcaaatctccagccaatcaggagccagcaacgacaaccactactttggctacagcaccccctgggggtattttgacttcaacagattccactgccacttttcaccacgtgactggcaaagactcatcaacaacaactggggattccggcccaaaagactcaacttcaagctctttaatattcaagtcaaagaggtcacgcagaatgacggtacgacgacgattgccaataaccttaccagcacggttcaggtgtttactgactcggagtaccagctcccgtacgtcctgggctcggcgcatcaaggatgcctcccgccgtttccagcggacgtcttcatggtcccacagtatggatacctcaccctgaacaacgggagtcaggcggtaggacgctcttccttttactgcctggagtactttccttctcagatgctgcgtactggaaacaactttcagttcagctacacttttgaagacgtgcctttccacagcagctacgctcacagccagagtctggatcggctgatgaatcctctgatcgaccagtacctgtattatctgaacaagacacaaacaaatagtggaactcttcagcagtctcggctactgtttagccaagctggaccaaccaacatgtctcttcaagctaaaaactggctgcctggaccttgctacagacagcagcgtctgtcaaaacaggcaaacgacaacaacaacagcaactttccctggactgcagctacaaagtatcatctaaatggccgggactcgttggttaatccaggaccagctatggccagtcacaaggatgacgaagaaaagtttttccccatgcatggaaccctgatatttggtaaacaaggaacaaatgccaacgacgcggatttggaaaatgtcatgattacagatgaagaagaaatcagggccaccaatcccgtggctacggagcagtacgggactgtgtcaaataatttgcaaaactcaaacactggtccaactactggaactgtcaatcgccaaggagcgttacctggtatggtgtggcaggatcgagacgtgtacctgcagggacccatttgggccaagattcctcacaccgatggacactttcatccttctccactgatgggaggttttggactcaaacacccgcctcctcagatcatgatcaaaaacactcccgttccagccaatcctcccacaaacttcagttctgccaagtttgcttctttcatcacacagtattccacgggacaggtcagcgtggagatcgagtgggagctgcagaaggagaacagcaaacgctggaatcccgaaattcagtacacttccaactacaacaagtctgttaatgtggactttactgtggacactaatggtgtgtattcagagcctcgccccattggcaccagatacctgactcgtaatctgtaattgcttgttaatcaataaaccgtttaattcgtttcagttgaactttggtctctgcgaagggcgaa

SEQ ID NO: 171 - DNA, 3142 bp, Artificial Sequence
  source: /note="Description of Artificial Sequence: Synthetic polynucleotide"
aaaacgacgggccagtgattgtaatacgactcactatagggcgaaattgaaattagcggccgcgaattcgcctttcgcagagaccaaagttcaactgaaacgaattaaacggtttattgattaacaagcaattacagattacgagtcaggtatctggtgccaatggggcgaggctctgaatacacaccattagtgtccacagtaaagtccacattaacagacttgttgtagttggaagtgtactgaatttcgggattccagcgtttgctgttctccttctgcagctcccactcgatctccacgctgacctgtcccgtggaatactgtgtgatgaaagaagcaaacttggcagaactgaagtttgtgggaggattggctggaacgggagtgtttttgatcatgatctgaggaggcgggtgtttgagtccaaaacctcccatcagtggagaaggatgaaagtgtccatcggtgtgaggaatcttggcccaaatgggtccctgcaggtacacgtctcgatcctgccacaccataccaggtaacgctccttggtgattgacagttccagtagttggaccagtgtttgagttttgcaaattatttgacacagtcccgtactgctccgtagccacgggattggtggccctgatttcttcttcatctgtaatcatgacattttccaaatccgcgtcgttggcatttgttccttgtttaccaaatatcagggttccatgcatggggaaaaacttttcttcgtcatccttgtgactggccatagctggtcctggattaaccaacgagtcccggccatttagatgatactttgtagctgcagtccagggaaagttgctgttgttgttgtcgtttgcctgttttgacagacgctgctgtctgtagcaaggtccaggcagccagtttttagcttgaagagacatgttggttggtccagcttggctaaacagtagccgagactgctgaagagttccactatttgtttgtgtcttgttcagataatacaggtactggtcgatcagaggattcatcagccgatccagactctggctgtgagcgtagctgctgtggaaaggcacgtcttcaaaagtgtagctgaactgaaagttgtttccagtacgcagcatctgagaaggaaagtactccaggcagtaaaaggaagagcgtcctaccgcctgactcccgttgttcagggtgaggtatccatactgtgggaccatgaagacgtccgctggaaacggcgggaggcatccttgatgcgccgagcccaggacgtacgggagctggtactccgagtcagtaaacacctgaaccgtgctggtaaggttattggcaatcgtcgtcgtaccgtcattctgcgtgacctctttgacttgaatattaaagagcttgaagttgagtcttttgggccggaatccccggttgttgttgacgagtctttgccagtcacgtggtgaaaagtggcagtggaatctgttgaagtcaaaatacccccagggggtgctgtagccaaagtagtggttgtcgttgctggctcctgattggctggagatttgcttgtagaggtggttgttgtatgtgggcagggcccaggttcgggtgctggtggtgatgactctgtcgcccagccattgggaatcgcaatgccaatttcctgaggaattacccactccatcggcaccctcgttattgtctgccattggtgcgccactgcctgtagccattgtagtagatcccagaccagagggggctgctggtggctgtccgagaggctgggggtcaggtacggagtctgcgtctccagtctgaccaaaatttaatctttttcttgcaggctgctggcccgcttttccggttcccgaggaggagtctggctccacaggagagtgctctaccggcctcttttttcccggagccgtcttaacaggctcctcaaccaggcccagaggttcaagaaccctctttttcgcctggaagactgctcgtccgaggttgcccccaaaagacgtatcttctttaaggcgctcctgaaactctgcgtcggcgtggttgtacttgaggtacgggttgtctccgctgtcgagctgccggtcgtaggccttgtcgtgctcgagggccgcggcgtctgcctcgttgaccggctcccccttgtcgagtccgttgaagggtccgaggtacttgtacccaggaagcacaagacccctgctgtcgtccttatgccgctctgcgggctttggtggtggtgggccaggtttgagcttccaccactgtcttattccttcagagagagtgtcctcgagccaatctggaagataaccatcggcagccatacctgatttaaatcatttattgttcagagatgcagtcatccaaatccacattgaccagatcgcaggcagtgcaagcgtctggcacctttcccatgatatgatgaatgtagcacagtttctgatacgcctttttgacgacagaaacgggttgagattctgacacgggaaagcactctaaacagtctttctgtccgtgagtgaagcagatatttgaattctgattcattctctcgcattgtctgcagggaaacagcatcagattcatgcccacgtgacgagaacatttgttttggtacctgtccgcgtagttgatcgaagcttccgcgtctgacgtcgatggctgcgcaactgactcgcgcgcccgtttgggctcacttatatctgcgtcactgggggcgggtcttttcttagctccaccctttttgacgtagaattcatgctccacctcaaccacgtgatcctttgcccaccggaaaaagtctttcacttcctgcttggtgacctttccaaagtcatgatccagacggcgggtaagttcaaatttgaacatccggtcttgcaacggctgctggtgctcgaaggtcgttgagttcccgtcaatcacggcgcacatgttggtgttggaggtgacgatcacgggagtcgggtctatctgggccgaggacttgcatttctggtccacacgcaccttgcttcctccaagaatggctttggccgactccacgaccttggcggtcatcttcccctcctcccaccagatcaccatcttgtcgacgcaatggtaaaaggaaagttctcattgg

SEQ ID NO: 172 - protein, 735 aa, Adeno-associated virus-2
MAADGYLPDWLEDTLSEGIRQWWKLKPGPPPPKPAERHKDDSRGLVLPGYKYLGPFNGLDKGEPVNEADAAALEHDKAYDRQLDSGDNPYLKYNHADAEFQERLKEDTSFGGNLGRAVFQAKKRVLEPLGLVEEPVKTAPGKKRPVEHSPVEPDSSSGTGKAGQQPARKRLNFGQTGDADSVPDPQPLGEPPATPAAVGPTTMASGGGAPMADNNEGADGVGNASGNWHCDSTWLGDRVITTSTRTWALPTYNNHLYKQISSASTGASNDNHYFGYSTPWGYFDFNRFHCHFSPRDWQRLINNNWGFRPKRLNFKLFNIQVKEVTQNDGTTTIANNLTSTVQVFTDSEYQLPYVLGSAHQGCLPPFPADVFMIPQYGYLTLNNGSQAVGRSSFYCLEYFPSQMLRTGNNFTFSYTFEDVPFHSSYAHSQSLDRLMNPLIDQYLYYLNRTQNQSGSAQDKALLFSRGSPAGMSVQPKNWLPGPCYRQQRVSKTKTDNNNSNFTWTGASKYNLNGRESIINPGTAMASHKDDKDKFFPMSGVMIFGKESAGASNTALDNVMITDEEEIKATNPVATERFGTVAVNFQSSSTDPATGDVHVMGALPGMVWQDRDVYLQGPIWAKIPHTDGHFHPSPLMGGFGLKHPPPQILIKNTPVPANPPAEFSATKFASFITQYSTGQVSVEIEWELQKENSKRWNPEVQYTSNYAKSANVDFTVDNNGLYTEPRPIGTRYLTRP

SEQ ID NO: 173 - protein, 740 aa, Adeno-associated virus-2
MAADGYLPDWLEDTLSEGIRQWWKLKPGPPPPKPAERHKDDSRGLVLPGYKYLGPFNGLDKGEPVNAADAAALEHDKAYDRQLDSGDNPYLKYNHADAEFQERLKEDTSFGGNLGRAVFQAKKRVLEPLGLVEEPVKTAPGKKRPVEHSPVEPDSSSGTGKAGQQPARKRLNFGQTGDADSVPDPQPLGQPPAAPSGLGTNTMATGSGAPMADNNEGADGVGNSSGNWHCDSTWMGDRVITTSTRTWALPTYNNHLYKQISSQSGASNDNHYFGYSTPWGYFDFNRFHCHFSPRDWQRLINNNWGFRPKRLNFKLFNIQVKEVTQNDGTTTIANNLTSTVQVFTDSEYQLPYVLGSAHQGCLPPFPADVFMVPQYGYLTLNNGSQAVGRSSFYCLEYFPSQMLRTGNNFTFSYTFEDVPFHSSYAHSQSLDRLMNPLIDQYLYYLSRTNTPSGTTTQSGLQFSQAGASDIRDQSRNWLPGPCYRQQRVSKTSADNNNSEYSWTGATKYHLNGRDSLVNPGPAMASHKDDEEKFFPQSGVLIFGKQGSEKTNVDIEKVMITDEEEIRTTNPVATEQYGSVSTNLQRGNRQAATADVNTQGVLPGMVWQDRDVYLQGPIWAKIPHTDGHFHPSPLMGGFGLKHPPPQILIKNTPVPANPSTTFSAAKFASFITQYSTGQVSVEIEWELQKENSKRWNPEIQYTSNYNKSVNVDFTVDTNGVYSEPRPIGTRYLTRNLLLAAA

SEQ ID NO: 174 - protein, 734 aa, Adeno-associated virus-2
MAADGYLPDWLEDTLSEGIRQWWKLKPGPPPPKPAERHKDDSRGLVLPGYKYLGPFNGLDKGEPVNEADAAALEHDKAYDRQLDSGDNPYLKYNHADAEFQERLKEDTSFGGNLGRAVFQAKKRVLEPLGLVEEPVKTAPGKKRPVEHSPVEPDSSSGTGKAGQQPARKRLNFGQTGDADSVPDPQPLGQPPAAPSGLGTNTMATGSGAPMADNNEGADGVGNSSGNWHCDSTWMGDRVITTSTRTWALPTYNNHLYKQISSQSGASNDNHYFGYSTPWGYFDFNRFHCHFSPRDWQRLINNNWGFRPKRLNFKLFNIQVKEVTQNDGTTTIANNLTSTVQVFTDSEYQLPYVLGSAHQGCLPPFPADVFMVPQYGYLTLNNGSQAVGRSSFYCLEYFPSQMLRTGNNFTFSYTFEDVPFHSSYAHSQSLDRLMNPLIDQYLYYLSRTNTPSGTTTQSGLQFSQAGASDIRDQSRNWLPGPCYRQQRVSKTSADNNNSEYSWTGATMYHLNGRDSLVNPGPAMASHKDDEEKFFPQSGVLIFGKQGSEKTNVDIEKVMITDEEEIRTTNPVATEQYGSVSTNLQRGNRQAATADVNTQGVLPGMVWQDRDVYLQGPIWAKIPHTDGHFHPSPLMGGFGLKHPPPQILIKNTPVPANPSTTFSAAKFASFITQYSTGQVSVEIEWELQKENSKRWNPEIQYTSNYNKSINVDFTVDTNGVYSEPRPIGTRYLTRN

SEQ ID NO: 175 - protein, 734 aa, Adeno-associated virus-2
MAADGYLPDWLEDTLSEGIRQWWKLKPGPPPPKPAERHKDDSRGLVLPGYKYLGPFNGLDKGEPVNEADAAALEHDKAYDRQLDSGDNPYLKYNHADAEFQERLKEDTSFGGNLGRAVFQAKKRVLEPLGLVEEPVKTAPGKKRPVEHSPVEPDSSSGTGKAGQQPARKRLNFGQTGDADSVPDPQPLGQPPAAPSGLGTNTMATGSGAPMADNNEGADGVGNSSGNWHCDSTWMGDRVITTSTRTWALPTYNNHLYKQISSQSGASNDNHYFGYSTPWGYFDFNRFHCHFSPRDWQRLINNNWGFRPKRLNFKLFNIQVKEVTQNDGTTTIANNLTSTVQVFTDSEYQLPYVLGSAHQGCLPPFPADVFMVPQYGYLTLNNGSQAVGRSSFYCLEYFPSQMLRTGNNFTFSYTFEDVPFHSSYAHSQSLDRLMNPLIDQYLYYLSRTNTPSGTTTQSGLQFSQAGASDIRDQSRNWLPGPCYRQQRVSKTSADNNNSEYSWTGATKYHLNGRDSLVNPGPAMASHKDDEEKFFPQSGVLIFGKQGSEKTNVDIEKVMITDEEEIRTTNPVATEQYGSVSTNLQRGNRQAATADVNTQGVLPGMVWQDRDVYLQGPIWAKIPHTDGHFHPSPLMGGFGLKHPPPQILIKNTPVPANPSTTFSEAKFASFITQYSTGQVSVEIEWELQKENSKRWNPEIQYTSNYNKSVNVDFTVDTNGVYSEPRPIGTRYLTRN

SEQ ID NO: 176 - protein, 739 aa, Adeno-associated virus-2
MAADGYLPDWLEDTLSEGIRQWWKLKPGPPPPKPAERHKDDSRGLVLPGYKYLGPFNGLDKGEPVNEADAAALEHDKAYDRQLDSGDNPYLKYNHADAEFQERLKEDTSFGGNLGRAVFQAKKRVLEPLGLVEEPVKTAPGKKRPVEHSPVEPDSSSGTGKAGQQPARKRLNFGQTGDADSVPDPQPLGQPPAAPSGLGTNTMATGSGAPMADNNEGADGVGNSSGNWHCDSTWMGDRVITTSTRTWALPTYNNHLYKQISSQSGASNDNHYFGYSTPWGYFDFNRFHCHFSPRDWQRLINNNWGFRPKRLNFKLFNIQVKEVTQNDGTTTIANNLTSTVQVFTDSEYQLPYVLGSAHQGCLPPFPADVFMVPQYGYLTLNNGSQAVGRSSFYCLEYFPSQMLRTGNNFTFSYTFEDVPFHSSYAHSQSLDRLMNPLIDQYLYYLSRTNTPSGTTTQSGLQFSQAGASDIRDQSRNWLPGPCYRQQRVSKTSADNNNSEYSWTGATKYHLNGRDSLVNPGPAMASHKDDEEKFFPQSGVLIFGKQGSEKTNVDIEKVMITDEEEIRTTNPVATEQYGSVSTNLQRGNRQAATADVNTQGVLPGMVWQDRDVYLQGPIWAKIPHTDGHFHPSPLMGGFGLKHPPPQILIKNTPVPANPSTTFSAAKFASFITQYSTGQVSVEIEWELQKENSKRWNPEIQYTSNYNKSVNVDFTVDTNGVYSEPRPIGTRYLTRNLLLAA

SEQ ID NO: 177 - protein, 725 aa, Adeno-associated virus-2
MAADGYLPDWLEDTLSEGIRQWWKLKPGPPPPKPAERHKDDSRGLVLPGYKYLGPFNGLDKGEPVNEADAAALEHDKAYDRQLDSGDNPYLKYNHADAEFQERLKEDTSFGGNLGRAVFQAKKRVLEPLGLVEEPVKTAPGKKRPVEHSPVEPDSSSGTGKAGQQPARKRLNFGQTGDADSVPDPQPLGQPPAAPSGLGTNTMATGSGAPMADNNEGADGVGNSSGNWHCDSTWMGDRVITTSTRTWALPTYNNHLYKQISSQSGASNDNHYFGYSTPWGYFDFNRFHCHFSPRDWQRLINNNWGFRPKRLNFKLFNIQVKEVTQNDGTTTIANNLTSTVQVFTDSEYQLPYVLGSAHQGCLPPFPADVFMVPQYGYLTLNNGSQAVGRSSFYCLEYFPSQMLRTGNNFTFSYTFEDVPFHSSYAHSQSLDRLMNPLIDQYLYYLSRTNTPSGTTTQSGLQFSQAGASDIRDQSRNWLPGPCYRQQRVSKTSADNNNSEYSWTGATKYHLNGRDSLVNPGPAMASHKDDEEKFFPQSGVLIFGKQGSEKTNVDIEKVMITDEEEIRTTNPVATEQYGSVSTNLQRGNRQAATADVNTQGVLPGMVWQDRDVYLQGPIWAKIPHTDGHFHPSPLMGGFGLKHPPPQILIKNTPVPANPSTTFSAAKFASFITQYSTGQVSVEIEWELQKENSKRWNPEIQYTSNYNKSVNVDFTVDTNGVYSEPRP

SEQ ID NO: 178 - protein, 707 aa, Adeno-associated virus-2
MAADGYLPDWLEDTLSEGIRQWWKLKPGPPPPKPAERHKDDSRGLVLPGYKYLGPFNGLDKGEPVNEADAAALEHDKAYDRQLDSGDNPYLKYNHADAEFQERLKEDTSFGGNLGRAVFQAKKRVLEPLGLVEEPVKTAPGKKRPVEHSPVEPDSSSGTGKAGQQPARKRLNFGQTGDADSVPDPQPLGQPPAAPSGLGTNTMATGSGAPMADNNEGADGVGNSSGNWHCDSTWMGDRVITTSTRTWALPTYNNHLYKQISSQSGASNDNHYFGYSTPWGYFDFNRFHCHFSPRDWQRLINNNWGFRPKRLNFKLFNIQVKEVTQNDGTTTIANNLTSTVQVFTDSEYQLPYVLGSAHQGCLPPFPADVFMVPQYGYLTLNNGSQAVGRSSFYCLEYFPSQMLRTGNNFTFSYTFEDVPFHSSYAHSQSLDRLMNPLIDQYLYYLSRTNTPSGTTTQSGLQFSQAGASDIRDQSRNWLPGPCYRQQRVSKTSADNNNSEYSWTGATKYHLNGRDSLVNPGPAMASHKDDEEKFFPQSGVLIFGKQGSEKTNVDIEKVMITDEEEIRTTNPVATEQYGSCIYQPPERQQTSSYRRCQHTRRSSRHGLAGQRCVPSGAHLGKDSTHGRTFSPLSPHGWIRTTPSSTDSHQEHPGTCESFDHLQCGKVCFLHHTVLHGTGQRGDRVRAAEGKQQTLESRNSVHFQLQQVC

SEQ ID NO: 179 - protein, 739 aa, Adeno-associated virus-2; identical to SEQ ID NO: 176

SEQ ID NO: 180 - protein, 737 aa, Adeno-associated virus-2
MASDGYLPDWLEDNLSEGIREWWDLKPGAPKPKANQQKQDDGRGLVLPGYKYLGPFNGLDKGEPVNAADAAALEHDKAYDQQLKAGDNPYLRYNHADAEFQERLQEDTSFGGNLGRAVFQAKKRVLEPFGLVEEGAKTAPGKKRPVEQSPQEPDSSSGIGKTGQQPAKKRLNFGQTGDSESVPDPQPLGEPPATPAAVGPTTMASGGGAPMADNNEGADGVGNASGNWHCDSTWLGDRVITTSTRTWALPTYNNHLYKQISSASTGASNDNHYFGYSTPWGYFDFNRFHCHFSPRDWQRLINNNWGFRPKRLNFKLFNIQVKEVTTNDGTTTIANNLTSTVQVFTDSEYQLPYVLGSAHQGCLPPFPADVFMVPQYGYLTLNNGSQAVGRSSFYCLEYFPSQMLRTGNNFTFSYTFEDVPFHSSYAHSQSLDRLMNPLIDQYLYYLSRTNTPSGTTTQSGLQFSQAGASDIRDQSRNWLPGPCYRQQRVSKTSADNNNSEYSWTGATKYHLNGRDSLVNPGPAMASHKDDEEKFFPQSGVLIFGKQGSEKTNVDIEKVMITDEEEIRTTNPVATEQYGSVSTNLQRGNRQAATADVNTQGVLPGMVWQDRDVYLQGPIWAKIPHTDGHFHPSPLMGGFGLKHHPPQILIKNTPVPANPSTTFSAAKFASFITQYSTGQVSVEIEWELQKENSKRWNPEIQYTSNYNKSVNVDFTVDTNGVYSEPRPIGTRYLTRNLL

SEQ ID NO: 181 - protein, 741 aa, Adeno-associated virus-2
MAADGYLPDWLEDTLSEGIREWWALKPGAPKPKANQQKQDDGRGLVLPGYKYLGPFNGLDKGEPVNEADAAALEHDKAYDQQLQAGDNPYLRYNHADAEFQERLQEDTSFGGNLGRAVFQAKKRVLEPLGLVEEPVKTAPGKKRPVEHSPVEPDSSSGTGKSGQQPARKRLNFGQTGDADSVPDPQPLGQPPAAPSGLGTNTMATGSGAPMADNNEGADGVGNSSGNWHCDSTWMGDRVITTSTRTWALPTYNNHLYKQISSQSGASNDNHYFGYSTPWGYFDFNRFHCHFSPRDWQRLINNNWGFRPKRLNFKLFNIQVKEVTQNDGTTTIANNLTSTVQVFTDSEYQLPYVLGSAHQGCLPPFPADVFMVPQYGYLTLNNGSQAVGRSSFYCLEYFPSQMLRTGNNFTFSYTFEDVPFHSSYAHSQSLDRLMNPLIDQYLYYLSRTNTPSGTTTQSGLQFSQAGASDIRDQSRNWLPGPCYRQQRVSKTSADNNNSEYSWTGATKYHLNGRDSLVNPGPAMASHKDDEEKFFPQSGVLIFGKQGSEKTNVDIEKVMITDEEEIRTTNPVATEQYGSVSTNLQRGNLANHNNTTNARQAATADVNTQGVLPGMVWQDRDVYLQGPIWAKIPHTDGHFHPSPLMGGFGLKHPPPQILIKNTPVPANPSTTFSAAKFASFITQYSTGQVSVEIEWELQKENSKRWNPEIQYTSNYNKSINVDFTVDTNGVYSEPRPIGTRYL

SEQ ID NO: 182 - protein, 730 aa, Adeno-associated virus-2
MASDGYLPDWLEDNLSEGIREWWDLKPGAPKPKANQQKQDDGRGLVLPGYKYLGPFNGLDKGEPVNAADAAALEHDKAYDQQLKAGDNPYLRYNHADAEFQERLQEDTSFGGNLGRAVFQAKKRVLEPFGLVEEGAKTAPGKKRPVEQSPQEPDSSSGIGKTGQQPAKKRLNFGQTGDSESVPDPQPLGEPPATPAAVGPTTMASGGGAPMADNNEGADGVGNASGNWHCDSTWLGDRVITTSTRTWALPTYNNHLYKQISSASTGASNDNHYFGYSTPWGYFDFNRFHCHFSPRDWQRLINNNWGFRPKRLNFKLFNIQVKEVTTNDGVTTIANNLTSTVQVFSDSEYQLPYVLGSAHQGCLPPFPADVFMIPQYGYLTLNNGSQAVGRSSFYCLEYFPSQMLRTGNNFTFSYTFEDVPFHSSYAHSQSLDRLMNPLIDQYLYYLNRTQNQSGSAQNNDLLFSRGSPAGMSVQPKNWLPGPCYRQQRVSKTKTDNNNSNFTWTGASKYNLNGRESIINPGTAMASHKDDKDKFFPMSGVMIFGKESAGASNTALDNVMITDEEEIKATNPVATERFGTVAVNLQSSSTDPATGDVHVMGALPGMVWQDRDVYLQGPIWAKIPHTDGHFHPSPLMGGFGLKNPPPQILIKNTPVPANPPAEFSATKFASFITQYSTGQVSVEIEWELQKENSKRWNPEVQYTSNYAKSANVDFTVDNNGLYTEPRPIGTR

SEQ ID NO: 183 - protein, 735 aa, Adeno-associated virus-2
  MOD_RES (239)..(239): Any amino acid
MASDGYLPDWLEDNLSEGIREWWDLKPGAPKPKANQQKQDDGRGLVLPGYKYLGPFNGLDKGEPVNAADAAALEHDKAYDQQLKAGDNPYLRYNHADAEFQERLQEDTSFGGNLGRAVFQAKKRVLEPFGLVEEGAKTAPGKKRPVEQSPQEPDSSSGIGKTGQQPAKKRLNFGQTGDSESVPDPQPLGEPPATPAAVGPTTMASGGGAPMADNNEGADGVGNASGNWHCDSTWLGDRXITTSTRTWALPTYNNHLYKQISSASTGASNDNHYFGYSTPWGYFDFNRFHCHFSPRDWQRLINNNWGFRPKRLNFKLFNIQVKEVTTNDGVTTIANNLTSTVQVFSDSEYQLPYVLGSAHQGCLPPFPADVFMIPQYGYLTLNNGSQAVGRSSFYCLEYFPSQMLRTGNNFTFSYTFEDVPFHSSYAHSQSLDRLMNPLIDQYLYYLNRTQNQSGSAQNNDLLFSRGSPAGMSVQPKNWLPGPCYRQQRVSKTKTDNNNSNFTWTGASKYNLNGRESIINPGTAMASHKDDKDKFFPMSGVMIFGKESAGASNTALDNVMITDEEEIKATNPVATERFGTVAVNLQSSSTDPATGDVHVMGALPGMVWQDRDVYLQGPIWAKIPHTDGHFHPSPLMGGFGLKNPPPQILIKNTPVPANPPAEFSATKFASFITQYSTGQVSVEIEWELQKENSKRWNPEVQYTSNYAKSANVDFTVDNNGLYTEPRPIGTRYLTRP

SEQ ID NO: 184 - protein, 733 aa, Adeno-associated virus-2
MASDGYLPDWLEDNLSEGIREWWDLKPGAPKPKANQQKQDDGRGLVLPGYKYLGPFNGLDKGEPVNAADAAALEHDKAYDQQLKAGDNPYLRYNHADAEFQERLQEDTSFGGNLGRAVFLAKKRVLEPFGLVEEGAKTAPGKKRPVEQSPQEPDSSSGIGKTGQQPAKKRLNFGQTGDSESVPDPQPLGEPPATPAAVGPTTMASGGGAPMADNNEGADGVGNASGNWHCDSTWLGDRVITTSTRTWALPTYNNHLYKQISSASTGASNDNHYFGYSTPWGYFDFNRFHCHFSPRDWQRLINNNWGFRPKRLNFKLFNIQVKEVTTNDGVTTIANNLTSTVQVFSDSEYQLPYVLGSAHQGCLPPFPADVFMIPQYGYLTLNNGSQAVGRSSFYCLEYFPSQMLRTGNNFTFSYTFEDVPFHSSYAHSQSLDRLMNPLIDQYLYYLNRTQNQSGSAQNNDLLFSRGSPAGMSVQPKNWLPGPCYRQQRVSKTKTDNNNSNFTWTGASKYNLNGRESIINPGTAMASHKDDKDKFFPMSGVMIFGKESAGASNTALDNVMITDEEEIKATNPVATERFGTVAVNLQSSSTDPATGDVHVMGALPGMVWQDRDVYLQGPIWAKIPHTDGHFHPSPLMGGFGLKNPPPQILIKNTPVPANPPAEFSATKFASFITQYSTGQVSVEIEWELQKENSKRWNPEVQYTSNYAKSANVDFTVDNNGLYTEPRPIGTRYLT

SEQ ID NO: 185 - protein, 734 aa, Adeno-associated virus-2
MAADGYLPDWLEDTLSEGIRQWWKLKPGPPPPKPAERHKDDSRGLVLPGCKYLGPFNGLDKGEPVNEADAAALEHDKAYDRQLDSGDNPYLKYNHADAEFQERLKEDTSFGGNLGRAVFQAKKRVLEPLGLVEEPVKTAPGKKRPVEHSPVEPDSSSGTGKAGQQPARKRLNFGQTGDADSVPDPQPLGQPPAAPSGLGTNTMATGSGAPMADNNEGADGVGNSSGNWHCDSTWMGDRVITTSTRTWALPTYNNHLYKQISSQSGASNDNHYFGYSTPWGYFDFNRFHCHFSPRDWQRLINNNWGFRPKRLNFKLFNIQVKEVTQNDGTTTIANNLTSTVQVFSDSEYQLPYVLGSAHQGCLPPFPADVFMIPQYGYLTLNNGSQAVGRSSFYCLEYFPSQMLRTGNNFTFNYTFEDVPFHSSYAHSQSLDRLMNPLIDQYLYYLNRTQNQSGSAQNNDLLFSRGSPAGMSVQPKNWLPGPCYRQQRVSKTKTDNNNSNFTWTGASKYNLNGRESIINPGTAMASHKDDKDKFFPMSGVMIFGKESAGASNTALDNVMITDEEEIKATNPVATERFGTVAVNLQSSSTDPATGDVHVMGALPGMVWQDRDVYLQGPIWAKIPHTDGHFHPSPLMGGFGLKNPPPQILIKNTPVPANPPAEFSATKFASFITQYSTGQVSVEIEWELQKENSKRWNPEVQYTSNYAKSANVDFTVDNNGLYTEPRPIGTRYLTRP

SEQ ID NO: 186 - protein, 734 aa, Adeno-associated virus-2
MAADGYLPDWLEDTLSEGIRQWWKLKPGPPPPKPAERHKDDSRGLVLPGYKYLGPFNGLDKGEPVNEADAAALEHDKAYDRQLDSGDNPYLKYNHADAEFQERLKEDTSFGGNLGRAVFQAKKRVLEPLGLVEEPVKTAPGKKRPVEHSPVEPDSSSGTGKAGQQPARKRLNFGQTGDADSVPDPQPLGQPPAAPSGLGTNTMATGSGAPMADNNEGADGVGNSSGNWHCDSTWMGDRVITTSTRTWALSTYNNHLYKQISSQSGASNDNHYFGYSTPWGYFDFNRFHCHFSPRDWQRLINNNWGFRPKRLNFKLFNIQVKEVTQNDGTTTIANNLTSTVQVFTDSEYQLPYVLGSAHQGCLPPFPADVFMVPQYGYLTLNNGSQAVGRSSFYCLEYFPSQMLRTGNNFTFSYTFEDVPFHSSYAHSQSLDRLMNPLIDQYLYYLSRTNTPSGTTTQSRLQFSQAGASDIRDQSRNWLPGPCYRQQRVSKTSADNNNSEYSWTGATKYHLNGRDSLVNPGPAMASHKDDEEKFFPQSGVLIFGKQGSEKTNVDIEKVMITDEEEIRTTNPVATEQYGSVSTNLQRGNRQAATADVNTQGVLPGMVWQDRDVYLQGPIWAKIPHTDGHFHPSPLMGGFGLKHPPPQILIKNTPVPANPSTTFSAAKFASFITQYSTGQVSVEIEWELQKENSKRWNPEIQYTSNYNKSINVDFTVDTNGVYSEPRPIGTRYLTRN

SEQ ID NO: 187 - protein, 738 aa, Adeno-associated virus-2
MAADGYLPDWLEDTLSEGIRQWWKLKPGPPPPKPAERHKDDSRGLVLPGYKYLGPFNGLDKGEPVNEADAAALEHDKAYDRQLDGGDNPYLKYNHADAEFQERLKEDTSFGGNLGRAVFQAKKRVLEPLGLVEEPVKTAPGKKRPVEHSPVEPDSSSGTGKAGQQPARKRLNFGQTGDADSVPDPQPLGQPPAAPSGLGTNTMATGSGAPMADNNEGADGVGNSSGNWHCDSTWMGDRVITTSTRTWALPTYNNHLYKQISSQSGASNDNHYFGYSTPWGYFDFNRFHCHFSPRDWQRLINNNWGFRPKRLNFKLFNIQVKEVTQNDGTTTIANNLTSTVQVFTDSEYQLPYVLGSAHQGCLPPFPADVFMVPQYGYLTLNNGSQAVGRSSFYCLEYFPSQMLRTGNNFTFSYTFEDVPFHSSYAHSQSLDRLMNPLIDQYLYYLSRTNTPSGTTTQSGLQFSQAGASDIRDQSRNWLPGPCYRQQRVSKTSADNNNSEYSWTGATKYHLNGRDSLVNPGPAMASHKDDEEKFFPQSGVLIFGKQGSEKTNVDIEKVMITDEEEIRTTNPVATEQYGSVSTNLQRGNRQAATADVNTQGVLPGMVWQDRDVYLQGPIWAKIPHTDGHFHPSPLMGGFGLKHPPPQILIKNTPVPANPSTTFSAAKFASFITQYSTGQVSVEIEWELQKENSKRWNPEIQYTSNYNKSVNVDFTVDTNGVYSEPRPIGTRYLTRNLLRP

SEQ ID NO: 188 - DNA, 2208 bp, Artificial Sequence
  source: /note="Description of Artificial Sequence: Synthetic polynucleotide"
atggctgccgatggttatcttccagattggctcgaggacactctctctgaaggaataagacagtggtggaagctcaaacctggcccaccaccaccaaagcccgcagagcggcataaggacgacagcaggggtcttgtgcttcctgggtacaagtacctcggacccttcaacggactcgacaagggggagccggtcaacgaggcagacgccgcggccctcgagcacgacaaggcctacgaccggcagctcgacagcggagacaacccgtacctcaagtacaaccacgccgacgcagagtttcaggagcgccttaaagaagatacgtcttttgggggcaacctcggacgagcagtcttccaggcgaaaaagagggttcttgaacctctgggcctggttgaggaacctgttaagacggctccgggaaaaaagaggccggtagagcactctcctgtggagccagactcctcctcgggaaccggaaaagcgggccagcagcctgcaagaaaaagattaaattttggtcagactggagacgcagactccgtacctgacccccagcctctcggacagccaccagcagccccctctggtctgggatctactacaatggctacaggcagtggcgcaccaatggcagacaataacgagggtgccgatggagtgggtaattcctcaggaaattggcattgcgattcccaatggctgggcgacagagtcatcaccaccagcacccgaacctgggccctgcccacatacaacaaccacctctacaagcaaatctccagccaatcaggagccagcaacgacaaccactactttggctacagcaccccctgggggtattttgacttcaacagattccactgccacttttcaccacgtgactggcaaagactcatcaacaacaactggggattccggcccaaaagactcaacttcaagctctttaatattcaagtcaaagaggtcacgcagaatggcggtacgacgacgattgccaataaccttaccagcacggttcaggtgtttactgactcggagtaccagctcccgtacgtcctgggctcggcgcatcaaggatgcctcccgccgtttccagcggacgtcttcatggtcccacagtatggatacctcaccctgaacaacgggagtcaggcggtaggacgctcttccttttactgcctggagtactttccttctcagatgctgcgtactggaaacaactttcagttcagctacacttttgaagacgtgcctttccacagcagctacgctcacagccagagtctggatcggctgatgaatcctctgatcgaccagtacctgtattatctgaacaagacacaaacaaatagtggaactcttcagcagtctcggctactgtttagccaagctggaccaaccaacatgtctcttcaagctaaaaactggctgcctggaccttgctacagacagcagcgtctgtcaaaacaggcaaacggcaacaacaacagcaactttccctggactgcagctacaaagtatcatctaaatggccgggactcgttggttaatccaggaccagctatggccagtcacaaggatgacgaagaaaagtttttccccatgcatggaaccctgatatttggtaaacaaggaacaaatgccaacgacgcggatttggaaaatgtcatgattacagatgaagaagaaatcagggccaccaatcccgtggctacggagcagtacgggactgtgtcaaataatttgcaaaactcaaacactggtccaactactggaactgtcaatcaccaaggagcgttacctggtatggtgtggcaggatcgagacgtgtacctgcagggacccatttgggccaagattcctcacaccgatggacactttcatccttctccactgacgggaggttttggactcaaacacccgcctcctcagatcatgatcaaaaacactcccgttccagccaatcctcccacaaacttcagttctgccaagtttgcttctttcatcacacagtattccacgggacaggtcagcgtggagatcgagtgggagctgcagaaggagaacagcaaacgctggaatcccgaaattcagtacacttccaactacaacaagtctgttaatgtggactttactgtggacactaatggtgtgtattcagagcctcgccccattggcaccagatacctgactcgtaatctgtaa

SEQ ID NO: 189 - protein, 735 aa, Artificial Sequence
  source: /note="Description of Artificial Sequence: Synthetic polypeptide"
MAADGYLPDWLEDTLSEGIRQWWKLKPGPPPPKPAERHKDDSRGLVLPGYKYLGPFNGLDKGEPVNEADAAALEHDKAYDRQLDSGDNPYLKYNHADAEFQERLKEDTSFGGNLGRAVFQAKKRVLEPLGLVEEPVKTAPGKKRPVEHSPVEPDSSSGTGKAGQQPARKRLNFGQTGDADSVPDPQPLGQPPAAPSGLGSTTMATGSGAPMADNNEGADGVGNSSGNWHCDSQWLGDRVITTSTRTWALPTYNNHLYKQISSQSGASNDNHYFGYSTPWGYFDFNRFHCHFSPRDWQRLINNNWGFRPKRLNFKLFNIQVKEVTQNGGTTTIANNLTSTVQVFTDSEYQLPYVLGSAHQGCLPPFPADVFMVPQYGYLTLNNGSQAVGRSSFYCLEYFPSQMLRTGNNFQFSYTFEDVPFHSSYAHSQSLDRLMNPLIDQYLYYLNKTQTNSGTLQQSRLLFSQAGPTNMSLQAKNWLPGPCYRQQRLSKQANGNNNSNFPWTAATKYHLNGRDSLVNPGPAMASHKDDEEKFFPMHGTLIFGKQGTNANDADLENVMITDEEEIRATNPVATEQYGTVSNNLQNSNTGPTTGTVNHQGALPGMVWQDRDVYLQGPIWAKIPHTDGHFHPSPLTGGFGLKHPPPQIMIKNTPVPANPPTNFSSAKFASFITQYSTGQVSVEIEWELQKENSKRWNPEIQYTSNYNKSVNVDFTVDTNGVYSEPRPIGTRYLTRNL

SEQ ID NO: 190 - DNA, 2208 bp, Artificial Sequence
  source: /note="Description of Artificial Sequence: Synthetic polynucleotide"
atggctgccgatggttatcttccagattggctcgaggacactctctctgaaggaataagacagtggtggaagctcaaacctggcccaccaccaccaaagctcgcagagcggcatcaggacgacagcaggggtcttgtgcttcctgggtacaagtacctcggacccttcaacggactcgacaaaggagagccggtcaacgaggcagacgccgcggccctcgagcacgacaaggcctacgaccggcagctcgacagcggagacaacccgtacctcaagtacaaccacgccgacgcggagtttcaggagcgtcttaaagaagatacgtcttttgggggcaacctcggacgagcagtcttccaggcgaaaaagagggttcttgaacctctgggcctggttgaggaacctgttaagacggctccgggaaaaaagaggccggtagagcactctcctgtggagccagactcctcctcgggaaccggaaaggcgggccatcagcctgcgagaaagagattgaattttggtcagactggagacgcagactccgtacctgacccccagcctctcggacagccaccagcagcccccacaagtctgggatctactacaatggctacaggcagtggcgcaccaatggcagacaataacgagggtgccgatggagtgggtaattcctcaggaaattggcattgcgattcccaatggctgggcgacagagtcatcaccaccagcacccgaacctgggccctgcccacctacaacaaccacctctacaagcaaatctccagccaatcaggagcctcgaacgacaaccactactttggctacagcaccccctgggggtattttgacttcaacagattccactgtcacttctccccacgtgattggcaaagactcatcaacaacaactggggattccgacccaagagactcaacttcaagctctttaacattcaagtcaaagaggtcacgcagaatgacggtacgacgacgattgccaataaccttaccagcacggttcaggtgtttactgactcggagtaccagctcccgtacgtcctcggctcggcgcatcaaggatgcctcccgccgtttccagcggacgtcttcacggtcccacagtatggatacctcaccctgaacaacgggagtcaggcggtaggacgctcttccttttactgcctggagtactttccttctcagatgctgcgtactggaaacaaccttaccttcagctacacctttgaggacgttcctttccacagcagctacgctcacagccagagtttggaccggctgatgaatcctctgatcgaccagtatctatattatctgaacaggacacaatcaaatagtggaactcttcagcagtctaggctactgtttagccaagctggacccaccagcatgtctcttcaagctaaaaactggctgcctggaccttgctacagacagcagcgtctttcaaagcaggcaaacgacaacaacaacagcaactttccctggactgcggctacaaagtatcatctaaatggccgggactcgttggttaatccaggaccagctatggccagccacaaagacgatgaagaaaagtttttccccatgcatggaaccctgatatttggtaaacaaggaacaaatgctaacgacgcggatttggagcatgttatgattacagatgaagaagaaatcaggaccaccaatcctgtggctacagagcagtacggaaacgtgtcaaataatttgcaaaactcaaatactggtccaactacagaaaatgtcaatcaccagggagcgttacctggtatggtgtggcaggatcgagacgtgtacctgcagggacccatttgggccaagattcctcacaccgacggacactttcacccttctccactgatgggaggttttggactcaaacacccgcctcctcaaatcatgatcaaaaacactcccgttccagccaatcctcccacaaactacagttctgccaagtttgcttctttcatcacacagtattccacgggccaggtcagcgtggagattgagtgggagctgcggaaggagaacagcaaacgctggaaccccgagatccagtatacttccaactacaacaaatctgttaatgtggactttactgtggacactaatggtgtgtattcagagcctcgccccattggcaccagatacctgactcgtaatctgtaa

SEQ ID NO: 191 - protein, 735 aa, Artificial Sequence
  source: /note="Description of Artificial Sequence: Synthetic polypeptide"
MAADGYLPDWLEDTLSEGIRQWWKLKPGPPPPKLAERHQDDSRGLVLPGYKYLGPFNGLDKGEPVNEADAAALEHDKAYDRQLDSGDNPYLKYNHADAEFQERLKEDTSFGGNLGRAVFQAKKRVLEPLGLVEEPVKTAPGKKRPVEHSPVEPDSSSGTGKAGHQPARKRLNFGQTGDADSVPDPQPLGQPPAAPTSLGSTTMATGSGAPMADNNEGADGVGNSSGNWHCDSQWLGDRVITTSTRTWALPTYNNHLYKQISSQSGASNDNHYFGYSTPWGYFDFNRFHCHFSPRDWQRLINNNWGFRPKRLNFKLFNIQVKEVTQNDGTTTIANNLTSTVQVFTDSEYQLPYVLGSAHQGCLPPFPADVFTVPQYGYLTLNNGSQAVGRSSFYCLEYFPSQMLRTGNNLTFSYTFEDVPFHSSYAHSQSLDRLMNPLIDQYLYYLNRTQSNSGTLQQSRLLFSQAGPTSMSLQAKNWLPGPCYRQQRLSKQANDNNNSNFPWTAATKYHLNGRDSLVNPGPAMASHKDDEEKFFPMHGTLIFGKQGTNANDADLEHVMITDEEEIRTTNPVATEQYGNVSNNLQNSNTGPTTENVNHQGALPGMVWQDRDVYLQGPIWAKIPHTDGHFHPSPLMGGFGLKHPPPQIMIKNTPVPANPPTNYSSAKFASFITQYSTGQVSVEIEWELRKENSKRWNPEIQYTSNYNKSVNVDFTVDTNGVYSEPRPIGTRYLTRNL

SEQ ID NO: 192 - DNA, 2208 bp, Artificial Sequence
  source: /note="Description of Artificial Sequence: Synthetic polynucleotide"
atggctgccgatggttatcttccagattggctcgaggacactctctctgaaggaataagacagtggtggaagctcaaacctggcccaccaccaccaaagcccgcagagcggcatcaggacgacagcaggggtcttgtgcttcctgggtacaagtacctcggacccttcaacggactcgacaaaggagagccggtcaacgaggcagacgccgcggccctcgagcacgacaaggcctacgaccggcagctcgacagcggagacaacccgtacctcaagtacaaccacgccgacgcggagtttcaggagcgtcttaaagaagatacgtcttttgggggcaacctcggacgagcagtcttccaggcgaaaaagagggttcttgaacctctgggcctggttgaggaacctgttaagacggctccgggaaaaaagaggccggtagagcactctcctgtggagccagactcctcctcgggaaccggaaaagcgggccatcagcctgcgagaaagagattgaattttggtcagactggagacgcagactccgtacctgacccccagcctctcggacagccaccagcagcccccacaagtttgggatctactacaatggctacaggcagtggcgcaccaatggcagacaataacgagggtgccgatggagtgggtaattcctcaggaaattggcattgcgattcccaatggctgggcgacagagtcatcaccaccagcacccgaacctgggccctgcccacctacaacaaccacctctacaagcaaatctccagccaatcaggagcctcgaacgacaaccactactttggctacagcaccccctgggggtattttgacttcaacagattccactgtcacttctccccacgtgattggcaaagactcatcaacaacaactggggattccgacccaagagactcaacttcaagctctttaacattcaagtcaaggaggtcacgcagaatgacggtacgacgacgattgccaataaccttaccagcacggttcaggtgtttactgactcggagtaccagctcccgtacgtcctcggctcggcgcatcaaggatgcctcccgccgtttccagcggacgtcttcatggtcccacagtatggatacctcaccctgaacaacgggagtcaggcggtaggacgctcttccttttactgcctggagtactttccttctcagatgctgcgtactggaaacaactttaccttcagctacacctttgaggacgttcctttccacagcagctacgctcacagccagagtttggaccggctgatgaatcctctgatcgaccagtatctatattatctgaacaggacacaatcaaatagtggaactcttcagcagtctaggctactgtttagccaagctggacccaccagcatgtctcttcaagctaaaaactggctgcctggaccttgctacagacagcagcgtctttcaaagcaggcaaacgacaacaacaacagcaactttccctggactgcggctacaaagtatcgtctaaatggccgggactcgttggttaatccaggaccagctatggccagccacaaagacgatgaagaaaagtttttccccatgcatggaaccctgatatttggtaaacaaggaacaaatgctaacgacgcggatttggagcatgttatgattacagatgaagaagaaatcaggaccaccaatcctgtggctacagagcagtacggaaacgtgtcaaataatttgcaaaactcaaatactggtccaactacagaaaatgtcaatcaccagggagcgttacctggtatggtgtggcaggatcgagacgtgtacctgcagggacccatttgggccaagattcctcacaccgacggacactttcacccttctccactgatgggaggttttggactcaaacacccgcctcctcaaatcatgatcaaaaacactcccgttccagccaatcctcccacaaacttcagttctgccaagtttgcttctttcatcacacagtattccacgggccaggtcagcgtggagattgagtgggagctgcagaaggagaacagcaaacgctggaaccccgagatccagtatacttccaactacaacaaatctgttaatgtggactttactgtggacactaatggtgtgtattcagagcctcgccccattggcaccagatacctgactcgtaatctgtaa

SEQ ID NO: 193 - protein, 735 aa, Artificial Sequence
  source: /note="Description of Artificial Sequence: Synthetic polypeptide"
MAADGYLPDWLEDTLSEGIRQWWKLKPGPPPPKPAERHQDDSRGLVLPGYKYLGPFNGLDKGEPVNEADAAALEHDKAYDRQLDSGDNPYLKYNHADAEFQERLKEDTSFGGNLGRAVFQAKKRVLEPLGLVEEPVKTAPGKKRPVEHSPVEPDSSSGTGKAGHQPARKRLNFGQTGDADSVPDPQPLGQPPAAPTSLGSTTMATGSGAPMADNNEGADGVGNSSGNWHCDSQWLGDRVITTSTRTWALPTYNNHLYKQISSQSGASNDNHYFGYSTPWGYFDFNRFHCHFSPRDWQRLINNNWGFRPKRLNFKLFNIQVKEVTQNDGTTTIANNLTSTVQVFTDSEYQLPYVLGSAHQGCLPPFPADVFMVPQYGYLTLNNGSQAVGRSSFYCLEYFPSQMLRTGNNFTFSYTFEDVPFHSSYAHSQSLDRLMNPLIDQYLYYLNRTQSNSGTLQQSRLLFSQAGPTSMSLQAKNWLPGPCYRQQRLSKQANDNNNSNFPWTAATKYRLNGRDSLVNPGPAMASHKDDEEKFFPMHGTLIFGKQGTNANDADLEHVMITDEEEIRTTNPVATEQYGNVSNNLQNSNTGPTTENVNHQGALPGMVWQDRDVYLQGPIWAKIPHTDGHFHPSPLMGGFGLKHPPPQIMIKNTPVPANPPTNFSSAKFASFITQYSTGQVSVEIEWELQKENSKRWNPEIQYTSNYNKSVNVDFTVDTNGVYSEPRPIGTRYLTRNL

SEQ ID NO: 194 - DNA, 2208 bp, Artificial Sequence
  source: /note="Description of Artificial Sequence: Synthetic polynucleotide"
atggctgccgatggttatcttccagattggctcgaggacactctctctgaaggaataagacagtggtggaagctcaaacctggcccaccaccaccaaagcccgcagagcggcatcaggacgacagcaggggtcttgtgcttcctgggtacaagtacctcggacccttcaacggactcgacaaaggagagccggtcaacgaggcagacgccgcggccctcgagcacgacaaggcctacgaccggcagctcgacagcggagacaacccgtacctcaagtacaaccacgccgacgcggagtttcaggagcgtcttaaagaagatacgtcttttgggggcaacctcggacgagcagtcttccaggcgaaaaagagggttcttgaacctctgggcctggttgaggaacctgttaagacggctccgggaaaaaagaggccggtagagcactctcctgtggagccagactcctcctcgggaaccggaaaagcgggccatcagcctgcgagaaagagattgaattttggtcagactggagacgcagactccgtacctgacccccagcctctcggacagccaccagcagcccccacaagtttgggatctactacaatggctacaggcagtggcgcaccaatggcagacaataacgagggtgccgatggagtgggtaattcctcaggaaattggcattgcgattcccaatggctgggcgacagagtcatcaccaccagcacccgaacctgggccctgcccacctacaacaaccacctctacaagcaaatctccagccaatcaggagcctcgaacgacaaccactactttggctacagcaccccctgggggtattttgacttcaacagattccactgtcacttctccccacgtgattggcaaagactcatcaacaacaactggggattccgacccaagagactcaacttcaagctctttaacattcaagtcaaagaggtcacgcagaatgacggtacgacgacgattgccaataaccttaccagcacggttcaggtgtttactgactcggagtaccagctcccgtacgtcctcggctcggcgcatcaaggatgcctcccgccgtttccagcggacgtcttcatggtcccacagtatggatacctcaccctgaacaacgggagtcaggcggtaggacgcccttccttttactgcctggagtactttccttctcagatgctgcgtactggaaacaactttaccttcagctacacctttgaggacgttcctttccacagcagctacgctcacagccagagtttggaccggctgatgaatcctctgatcgaccagtatctatattatctgaacaggacacaatcaaatagtggaactcttcagcagtctaggctactgtttagccaagctggacccaccagcatgtctcttcaagctaaaaactggctgcctggaccttgctacagacagcagcgtctttcaaagcaggcaaacgacaacaacaacagcaactttccctggactgcggctacaaagtatcatctaaatggccgggactcgttggttaatccaggaccagctatggccagccacaaagacgatgaagaaaagtttttccccatgcatgggaccctgatatttggtaaacaaggaacaaatgctaacgacgcggatttggagcatgttatgattacagatgaagaagaaatcaggaccaccaatcctgtggctacagagcagtacggaaacgtgtcaaataatttgcaaaactcaaatactggtccaactacagaaaatgtcaatcaccagggagcgttacctggtatggtgtggcaggatcgagacgtgtacctgcagggacccatttgggccaagattcctcacaccgacggacactttcacccttctccactgatgggaggttttggactcaaacacccgcctcctcaaatcatgatcaaaaacactcccgttccagccaatcctcccacaaacttcagttctgccaagtttgcttctttcatcacacagtattccacgggccaggtcagcgtggagattgagtgggagctgcagaaggagaacagcaaacgctggaaccccgagatccagtatacttccaactacaacaaatctgttaatgtggactttactgtggacactaatggtgtgtattcagagcctcgccccattggcaccagatacctgactcgtaatctgtaa

SEQ ID NO: 195 - protein, 735 aa, Artificial Sequence
  source: /note="Description of Artificial Sequence: Synthetic polypeptide"
MAADGYLPDWLEDTLSEGIRQWWKLKPGPPPPKPAERHQDDSRGLVLPGYKYLGPFNGLDKGEPVNEADAAALEHDKAYDRQLDSGDNPYLKYNHADAEFQERLKEDTSFGGNLGRAVFQAKKRVLEPLGLVEEPVKTAPGKKRPVEHSPVEPDSSSGTGKAGHQPARKRLNFGQTGDADSVPDPQPLGQPPAAPTSLGSTTMATGSGAPMADNNEGADGVGNSSGNWHCDSQWLGDRVITTSTRTWALPTYNNHLYKQISSQSGASNDNHYFGYSTPWGYFDFNRFHCHFSPRDWQRLINNNWGFRPKRLNFKLFNIQVKEVTQNDGTTTIANNLTSTVQVFTDSEYQLPYVLGSAHQGCLPPFPADVFMVPQYGYLTLNNGSQAVGRPSFYCLEYFPSQMLRTGNNFTFSYTFEDVPFHSSYAHSQSLDRLMNPLIDQYLYYLNRTQSNSGTLQQSRLLFSQAGPTSMSLQAKNWLPGPCYRQQRLSKQANDNNNSNFPWTAATKYHLNGRDSLVNPGPAMASHKDDEEKFFPMHGTLIFGKQGTNANDADLEHVMITDEEEIRTTNPVATEQYGNVSNNLQNSNTGPTTENVNHQGALPGMVWQDRDVYLQGPIWAKIPHTDGHFHPSPLMGGFGLKHPPPQIMIKNTPVPANPPTNFSSAKFASFITQYSTGQVSVEIEWELQKENSKRWNPEIQYTSNYNKSVNVDFTVDTNGVYSEPRPIGTRYLTRNL

SEQ ID NO: 196 - DNA, 2208 bp, Artificial Sequence
  source: /note="Description of Artificial Sequence: Synthetic polynucleotide"
atggctgccgatggttatcttccagattggctcgaggacactctctctgaaggaataagacagtggtggaagctcaaacctggcccaccaccaccaaagcccgcagagcggcataaggacgacagcaggggtcttgtgcttcctgggtacaagtacctcggacccttcaacggactcgacaagggagagccggtcaacgaggcagacgccgcggccctcgagcacgacaaggcctacgaccggcagctcgacagcggagacaacccgtacctcaagtacaaccacgccgacgcggagtttcaggagcgccttaaagaagatacgtcttttgggggcaacctcggacgagcagtcttccaggcaaaaaagagggttcttgaacctctgggcctggttgaggagcctgttaaaacggctccgggaaaaaagaggccggtagagcactctcctgcggagccagactcctcctcgggaaccggaaaagcgggccagcagcctgcaagaaaaagattgaatttcggtcagactggagacgcagactccgtacctgacccccagcctctcggacagccaccagcagccccctctggtctgggaactaatacgatggcttcaggcagtggcgcaccaatggcagacaataacgagggcgccgacggagtgggtaattcctcgggaaattggcattgcgattccacatggatgggcgacagagtcatcaccaccagcacccgaacttgggccctgcccacctacaacaaccatctctacaagcaaatctccagccaatcaggagccagcaacgacaaccactactttggctacagcaccccttgggggtattttgacttcaacagattccactgccacttttcaccacgtgactggcaaagactcatcaacaacaactggggattccggcccaagagactcaacttcaagctctttaacattcaagtcaaagaggtcacgcagaatgacggtacgacgacgattgccaataaccttaccagcacggttcaggtgtttactgactcggagtaccagctcccgtacgtcctcggctcggcgcatcaaggatgcctcccgccgttcccagcagacgtcttcatggtgccacagtatggatacctcaccctgaacaacgggagtcaggcagtaggacgctcttcattttactgcctggagtactttccttctcagatgctgcgtaccggaaacaactttaccttcagctacacctttgaggacgttcctttccacagcagctacgctcacagccagagtttggaccgtctcatgaatcctctcatcgaccagtacctgtattacttgagcagaacaaacactccaagcggaaccaccacgcagtccaggcttcagttttctcaggccggagcaagtgacattcgggaccagtctaggaactggcttcctggaccctgttaccgccagcagcgagtatcaaagacatctgcggataacaacaacagtgaatactcgtggactggagctaccaagtaccacctcaatggcagagactctctggtgaatccgggcccggccatggccagccacaaggacgatgaagaaaagttttttcctcagagcggggttctcatctttgggaagcaaggctcagagaaaacaaatgtggacattgaaaaggtcatgattacagacgaagaggaaatcaggaccaccaatcccgtggctacggagcagtatggttctgtatctaccaacctgcagggcggcaacacacaagcagctaccgcagatgtcaacacacaaggcgttcttccaggcatggtctggcaggacagagacgtgtacctgcaggggcccatctgggcaaagattccacacacggacggacattttcacccctctcccctcatgggcggattcggacttaaacaccctcctccacagattctcatcaagaacaccccggtacctgcgaatccttcgaccaccttcagtgcggcaaagtttgcttctttcatcacacagtattccacggggcaggtcagcgtggagatcgagtgggagctgcagaaggagaacagcaaacgctggaatcccgagatccagtacacttccaactacaacaaatctgttaatgtggactttactgttgacactaatggcgtgtattcagagcctcgccccattggcaccagatacctgactcgtaatctgtaa

SEQ ID NO: 197 - protein, 735 aa, Artificial Sequence
  source: /note="Description of Artificial Sequence: Synthetic polypeptide"
MAADGYLPDWLEDTLSEGIRQWWKLKPGPPPPKPAERHKDDSRGLVLPGYKYLGPFNGLDKGEPVNEADAAALEHDKAYDRQLDSGDNPYLKYNHADAEFQERLKEDTSFGGNLGRAVFQAKKRVLEPLGLVEEPVKTAPGKKRPVEHSPAEPDSSSGTGKAGQQPARKRLNFGQTGDADSVPDPQPLGQPPAAPSGLGTNTMASGSGAPMADNNEGADGVGNSSGNWHCDSTWMGDRVITTSTRTWALPTYNNHLYKQISSQSGASNDNHYFGYSTPWGYFDFNRFHCHFSPRDWQRLINNNWGFRPKRLNFKLFNIQVKEVTQNDGTTTIANNLTSTVQVFTDSEYQLPYVLGSAHQGCLPPFPADVFMVPQYGYLTLNNGSQAVGRSSFYCLEYFPSQMLRTGNNFTFSYTFEDVPFHSSYAHSQSLDRLMNPLIDQYLYYLSRTNTPSGTTTQSRLQFSQAGASDIRDQSRNWLPGPCYRQQRVSKTSADNNNSEYSWTGATKYHLNGRDSLVNPGPAMASHKDDEEKFFPQSGVLIFGKQGSEKTNVDIEKVMITDEEEIRTTNPVATEQYGSVSTNLQGGNTQAATADVNTQGVLPGMVWQDRDVYLQGPIWAKIPHTDGHFHPSPLMGGFGLKHPPPQILIKNTPVPANPSTTFSAAKFASFITQYSTGQVSVEIEWELQKENSKRWNPEIQYTSNYNKSVNVDFTVDTNGVYSEPRPIGTRYLTRNL

SEQ ID NO: 198 - DNA, 3161 bp, Artificial Sequence
  source: /note="Description of Artificial Sequence: Synthetic polynucleotide"
gattgaatttagcggccgcgaattcgcccttgctgcgtcaactggaccaatgagaactttccattcaatgattgcgtcgacaagatggtgatctggtgggaggagggaaagatgaccgccaaggtcatggagtcggccaaagccattctcggaggaagcaaggtgcgcgtggaccagaaatgtaagtcctcggcccagatagacccgactcccgtgattgtcacctccaacaccaacatgtgcgccgtgattgacgggaactcaacgaccttcgagcaccagcagccgttgcaagaccggatgttcaaatttgaactcacccgccgtctggatcatgactttgggaaggtcaccaagcaggaagtcaaagactttttccggtgggcaaaggatcacgtggttgaggtggagcatgaattctacgtcaaaaagggtggagccaagaaaagacccgcccccagtgacgcagatataagtgagcccaaacgggcgcgcgggtcagttgcgcagccatcgacgtcagacgcggaagcttcgatcaactacgcggacaggtaccaaaacaaatgttctcgtcacgtgggcatgaatctgatgctgtttccctgcagacaatgcgagagaatgaatcaaaattcaaatatctgcttcactcacggacagaaggactgtttagagtgctttcccgtgtcagaatctcaacccgtttctgtcgtcaaaaaggcgtatcagaaactttgctacattcatcatatcatgggaaaggtgccagacgcttgcactgcctgcgatctggtcaatgtggatttggatgactgcatctctgaacaataaatgatttaaatcaggtatggctgccgatggttatcttccagattggctcaaggacactctctctgaaggaataagacagtggtggaagctcaaacctggcccaccaccaccaaagcccgcagagcggcataaggacgacagcgggggtcttgtgcttcctgggtacaagtacctcggacccttcaacggactcgacaagggagagccggtcaacgaggcagacgccgcggccctcgagtacgacaaggcctacgaccggcagctcgacagcggagacaacccgtacctcaagtacaaccacgccgacgcggagtttcaggagcgccttaaagaagatacgtcttttgggggcaacctcggacgagcagtcttccaggcgaaaaagagggttcttgaacctctgggcctggttgaggaacctgttaagacggctccgggaaaaaagaggccggtagagcactctcctgtggagccagactcctcctcgggaacaggaaaagcgggccagcagcctgcgagaaagagattgaattttggtcagactggagacgcagactccgtacctgacccccagcctctcggacagccaccagcagccccctctggtctgggaactaatacgatggctacaggcagtggcgcaccaatggcagacaataacgagggcgccgacggagtgggtaattcctcgggaagttggcattgcgattccacatggatgggcgacagagtcatcaccaccagcacccgaacctgggctctgcccacctacaacaaccatctgtacaagcagatctccagccaatcaggagccagcaacgacaaccactactttggctacagcaccccttgggggtattttgacttcaacagattccactgccacttttcaccacgtgactggcaaagactcatcaacaacaactggggattccggcccaagagactcaacttcaagctctttaacattcaagtcaaggaggtcacgcagaatgacggtacgacgacgattgccaataaccttaccagcacggttcaggtgtttactgactcggagtaccagctcccgtacgtccccggctcggcgcatcaaggatgcctcccgccgttcccagcagacgtcttcatggtgccacagtatggatacctcaccctgaacaacgggagtcaggcagtaggacgctcttcattttactgcctggagtactttccttctcagatgcttcgtaccggaaacaactttaccttcagctacacctttgaggatgttcctttccacagcagctacgctcacagccagagtttggaccgtctcatgaatcctctcatcgaccagtacctgtattacttgagcagaacaaacactccaagcggaaccaccacgcagtccaggcttcagttttctcaggccggagcaagtgacattcgggaccagtctaggaactggcttcctggaccctgttaccgccagcagcgagtatcaaagacagctgcggacaacaacaacagtgaatactcgtggactggagctaccaagtaccacctcaatggcagagactctctggtgaatccgggcccggccatggccagccacaaggacgatgaagaaaagttttttcctcaaagcggggttctcatctttgggaagcaaggctcagagaaaacaaatgtggacattgaaaaggtcatgattacagacgaagaggaaatcagaaccaccaatcccgtggccacggagcagtatggttctgtatctaccaacctccagagcggcaacacacaagcagctactgcagatgtcaacacacaaggcgttcttccaggcatggtctggcaggacagagacgtgcacctgcaggggcctatctgggcaaagattccacacacggacggacattttcacccctctcccctcatgggcggatttggacttaaacaccctcctccacagattctcatcaagaacaccccggtacctgcaaatccttcgaccaccttcagtgcggcaaagtttgcttccttcatcacacagtattccacagggcaggtcagcgtggagatcgagtgggagctgcagaaggagaacagcaaacgctggaaccccgagatccagtacacttccaactacaacaaatctgttaatgtggactttactgtggacactaatggtgtgtattcagagcctcgccccattggcaccagatacctgactcgtaatctgtaattgcttgttaatcaataaaccgtttaattcgtttcagttgaactttggtctctgcgaagggcgaattcgtttaaaccctgcaggactagtccctttagtgagg

SEQ ID NO: 199 - DNA, 3162 bp, Artificial Sequence
  source: /note="Description of Artificial Sequence: Synthetic polynucleotide"
gaattgaatttagcggccgcgaattcgcccttcgcagagaccaaagttcaactgaaacgaattaaacggtttattgattaacaagcaattacagattacgagtcaggtatctggtgccaatggggcgaggctctgaatacacgccattagtgtccacagtaaagtccacattaacagacttgttgtagttggaagtgtactgaatttcgggattccagcgtttgctgttttccttctgcagctcccactcgatctccacgctgacctgtcccgtggagtactgtgtgatgaaggaagcaaactttgccgcactgaaggtggtcgaaggattcgcaggtaccggggtgttcttgatgagaatctgtggaggagggtgtttaagtccgaatccacccatgaggggagaggggtgaaaatgtccgtccgtgtgtggaatctttgcccagatgggcccctgaaggtacacatctctgtcctgccagaccatgcctggaagaacgccttgtgtgttgacatctgcggtagctgcttgtctgttgcctctctggaggttggtagatacagaaccgtactgctccgtagccacgggattggttgtcctgatttcctcttcgtctgtaatcatgaccttttcaatgtccacatttgttttctctgagccttgcttcccaaagatgagaaccccgctctgaggaaaaaacttttcttcattgtccttgtggcttgccatggccgggcccggattcaccagagagtctctgccattgaggtggtacttggtagctccagtccacgagtattcactgttgttgttatccgcagatgtctttgatactcgctgctggcggtaacagggtccaggaagccagttcctagactggtcccgaatgtcactcgctccggcctgagaaaactgaagccttgactgcgtggtggttccacttggagtgtttgttgtgctcaagtaatacaggtactggtcgatgagaggattcatgagacggtccagactctggctgtgagcgtagccgctgtggaaaggaacgtcctcaaaagtgtagctgaaggtaaagttgtttccggtacgcagcatctgagaaggaaagtactccaggcagtaaaatgaagagcgtcctactgcctgactcccgttgttcagggtgaggtatccatactgtggcaccatgaagacgtctgctgggaacggcgggaggcatccttgatgcgccgagccgaggacgtacgggagctggtactccgagtcagtaaacacctgaaccgtgctggtaaggttattggcaatcgtcgtcgtaccgtcattctgcgtgacctctttgacttgaatgttaaagagcttgaagttgagtctcttgggtcggaatccccagttgttgttgatgagtctttgccagtcacgtggtgaaaagtggcagtggaatctgttgaagtcaaaatacccccaaggggtgctgtagccaaagtagtgattgtcgttcgaggctcctgattggctggaaatttgtttgtagaggtggttgttgtaggtgggcagggcccaggttcgggtgctggtggtgatgactctgtcgcccatccatgtggaatcgcaatgccaatttcccgaggaattacccactccgtcggcgccctcgttattgtctgccattggtgcgccactgcctgtagccatcgtattagttcccagaccagagggggctgctggtggctgtccgagaggctgggggtcaggtactgagtctgcgtctccagtctgaccaaaattcaatctttttcttgcaggctgctggcccgcctttccggttcccgaggaggagtctggctccacaggagagtgctctaccggcctcttttttcctggagccgtcttgacaggttccccaaccaggcccagaggttcaagaaccctctttttcgcctggaagactgctcgtccgaggttgcccccaaaagacgtatcttctttaaggcgctcctgaaactccgcgtcggcgtggttgtacttgaggtacgggttgtctccgctgtcgagctgccggtcgtaggctttgtcgtgctcgagggccgcggcgtctgcctcgttgaccggctctcccttgtcgagtccgttgaagggtccgaggtacttgtacccaggaagcacaagacccctgctgtcgtccttatgccgctctgcgggctttggtggtggtgggccaggtttgagcttccaccactgtcttattccttcagagagagtgtcctcgagccaatctggaagataaccatcggcagccatacctgatttaaatcatttattgttcaaagatgcagtcatccaaatccacattgaccagatcgcaggcagtgcaagcgtctggcacctttcccatgatatgatgaatgtagcacagtttctgatacgcctttttgacgacagaaacgggttgagattctgacacgggaaagcactctaaacagtctttctgtccgtgagtgaagcagatatttgaattctgattcattctctcgcattgtctgcagggaaacagcatcagattcatgcccacgtgacgagaacatttgttttggtacctgtctgcgtagttgatcgaagcttccgcgtctgacgtcgatggctgcgcaactgactcgcgcacccgtttgggctcacttatatctgcgtcactgggggcgggtcttttcttggctccaccctttttgacgtagaattcatgctccacctcaaccacgtgatcctttgcccaccggaaaaagtctttgacttcctgcttggtgaccttcccaaagtcatgatccagacggcgggtgagttcaaatttgaacatccggtcttgcaacggctgctggtgttcgaaggtcgttgagttcccgtcaatcacggcgcacatgttggtgttggaggtgacgatcacgggagtcgggtctatctgggccgaggacttgcatttctggtccacgcgcaccttgcttcctccgagaatggctttggccgactccacgaccttggcggtcatcttcccctcctcccaccagatcaccatcttgtcgacacagtcgttgaagggaaagttctcattggtccagttgacgcagcaagggcgaattcgtttaaacctgcaggactagtccctttagtgaggg

SEQ ID NO: 200 - DNA, 3164 bp, Artificial Sequence
  source: /note="Description of Artificial Sequence: Synthetic polynucleotide"
gcgaattgaatttagcggccgcgaattcgcccttcgcagagaccaaagttcaactgaaacgaattaaacggtttattgattaacaagcaattacaaattacgagtcaggtatctggtgccaatggggcgaggctctgaatacacgccattagtgtccacagtaaagtccacattaacagacttgttgtagttggaagtgtactgaatttcgggattccagcgtttgctgttttccttctgcagctcccactcgatctccacgctgacctgtcccgtggagtactgtgtgatgaaggaagcaaactttgccgcactgaaggtggtcgaaggattcgcaggtaccggggtgttcttgatgagaatctgtggaggagggtgtttaggtccgaatccacccatgaggggagaggggtgaaaatgtccgtccgtgtgtggaatctttgcccagatgggcccctgaaggtacacatctctgtcctgccagaccatgcctggaagaacgccttgtgtgttgacatctgcggtagctgcttgtctgttgcctctctggaggttggtagatacagaaccatactgctccgtagccacgggattggttgtcctgatttcctcttcgtctgtaatcatgaccttttcaatgtccacatttgttttctctgagccttgcttcccaaagatgagaaccccgctctgaggaaaaaacttttcttcattgtccttgtggcttgccatggccgggcccggattcaccagagagtctctgccattgaggtggtacttggtagctccagtccacgagtattcactgttgttgttatccgcagatgtctttgatactcgctgctggcggtaacagggtccaggaagccagttcctagactggtcccgaatgtcactcgctccggcctgagaaaactgaagccttgactgcgtggtggttccacttggagtgtttgttgtgctcaagtaatacaggtactggtcgatgagaggattcatgagacggtccagactctggctgtgagcgtagctgctgtggaaaggaacgtcctcaaaagtgtagctgaaggtaaagttgtttccggtacgcagcatctgagaaggaaagtactccgggcagtaaaatgaagagcgtcctactgcctgactcccgttgctcagggtgaggtatccatactgtggcaccatgaagacgtctgctgggaacggcgggaggcatccttgatgcgccgagccgaggacgtacgggagctggtactccgagtcagtaaacacctgaaccgtgctggtaaggttattggcaatcgtcgtcgtaccgtcattctgcgtgacctctttgacttgaatgttaaagagcttgaagttgagtctcttgggtcggaatccccagttgttgttgatgagtctttgccagtcacgtggtgaaaagtggcagtggaatctgttgaagtcaaaatacccccaaggggtgctgtagccaaagtagtgattgtcgttcgaggctcctgattggctggaaatttgtctgtagaggtggttgttgtaggtgggcagggcccaggttcgggtgctggtggtgatgactctgtcgcccatccatgtggaatcgcaatgccgatttcccgaggaattacccactccgtcggcgccctcgttattgtctgccattggtgcgccactgcctgtagccatcgtattagttcccagaccagagggggctgctggtggctgtccgagaggctgggggtcaggtactgagtctgcgtctccagtctgaccaaaattcaatctttttcttgcaggctgctggcccgcctttccggttcccgaggaggagtctggctccacaggagagtgctctaccggcctcttttttcccggagccgtcttaacaggttccccaaccaggcccagaggttcaagaaccctctttttcgcctggaagactgctcgtccgaggttgcccccaaaagacgtatcttctttaaggcgctcctgaaactccgcgtcggcgtggttgtacttgaggtacgggttgtctccgctgtcgagctgccggtcgtaggctttgtcgtgctcgagggccgcggcgtctgcctcgttgaccggctctcccttgtcgagtccgttgaagggtccgaggtacttgtacccaggaagcacaagacccctgctgtcgtccttatgccgctctgcgggctttggtggtggtgggccaggtttgagcttccaccactgtcttattccttcagagagagtgtcctcgagccaatctggaagataaccatcggcagccatacctgatttaaatcatttattgttcaaagatgcagtcatccaaatccacattgaccagatcgcaggcagtgcaagcgtctggcacctttcccatgatatgatgaatgtagcacagtttctgatacgcctttttgacgacagaaacgggttgagattctgacacgggaaagcactctaaacagtctttctgtccgtgagtgaagcagatatttgaattctgattcattctctcgcattgtctgcagggaaacagcatcagattcatgcccacgtgacgagaacatttgttttggtacctgtctgcgtagttgatcgaagcttccgcgtctgacgtcgatggctgcgcaactgactcgcgcacccgtttgggcccacttatatctgcgtcactgggggcgggtcttttcttggctccaccctttttgacgtagaattcatgctccacctcaaccacgtgatcctttgcccaccggaaaaagtctttgacttcctgcttggtgaccttcccaaagtcatgatccagacggcgggtgagttcaaatttgaacatccggtcttgcaacggctgctggtgttcgaaggtcgttgagttcccgtcaatcacggcgcacatgttggtgttggaggtgacgatcacgggagtcgggtctatctgggccgaggacttgcatttctggtccacgcgcaccttgcttcctccgagaatggctttggccgactccacgaccttggcggtcatcttcccctcctcccaccagatcaccatcttgtcgacacagtcgttgaagggaaagttctcattggtccagttgacgcagcaagggcgaattcgtttaaacctgcaggactagtccctttagtgaggg

SEQ ID NO: 201 - DNA, 3163 bp, Artificial Sequence
  source: /note="Description of Artificial Sequence: Synthetic polynucleotide"
accctcactaaagggactagtcctgcaggtttaaacgaattcgcccttgctgcgtcaactggagcaatgagaactttcccttcaacgactgtgtcgacaagatggtgatttggtgggaggaggggaagatgaccgccaaggtcgtggagtcggccaaagccattctcggaggaagcaaggtgcgcgtggaccagaaatgcaagtcctcggcccagatagatccgactcccgtgatcgtcacctccaacaccaacatgtgcgccgtgattgacgggaactcaacgaccttcgaacaccagcagccgttgcaagaccggatgttcaaatttgaactcacccgccgtctggatcatgactttgggaaggtcaccaagcaggaagtcaaagactttttccggtgggcaaaggatcacgtggttgaggtggagcatggattctacgtcaaaaagggtggagccaagaaaagacccgcccctagtgacgcagatataagtgagcccaaacgggtgcgcgagtcagttgcgcagccatcgacgtcggacgcggaagcttcgatcaactacgcggacaggtaccaaaacaaatgttctcgtcacgtgggcatgaatctgatgctgtttccctgcagacaatgcgagagaatgaatcaaaattcaaatatctgcttcactcacggacagaaagactgtttagagtgctttcccgtgtcagaatctcaacctgtttctgtcgtcaaaaaggcgtatcagaaactgcgctacattcatcatatcatgggaaaggtgccagacgcttgcactgcctgcgatctggtcaatgtggatttggatgactgcatctctgaacaataaatgatttaaatcaggtatggctgccgatggttatcttccagattggctcgaggacactctctctgaaggaataagacagtggtggaagctcaaacctggcccaccaccaccaaagcccgcagagcggcataaggacgacagcaggggtcttgtgcttcctgggtacaagtacctcggacccttcaacggactcgacaagggagagccggtcaacgaggcagacgccgcggccctcgagcacgacaaggcctacgaccggcagctcgacagcggagacaacccgtacctcaagtacaaccacgccgacgcggagtttcaggagcgtcttaaagaagatacgtcttttgggggcaacctcggacgagcagtcttccaggcgaaaaagagggttcttgaacctctgggcctggttgaggaacctgttaagacggctccgggaaaaaagaggccggtagagcactctcctgcggagccagactcctcctcgggaaccggaaaagcgggccagcagcctgcaagaaaaagactgaatttcggtcagactggagacgcagactccgtacctgacccccagcctctcggacagccaccagcagcccccacaagtttgggatctactacaatggctacaggcagtggcgcaccaatggcagacaataacgagggtgccgatggagtgggtaattcctcaggaaattggcattgcgattcccaatggctgggcgacagagtcatcaccaccagcacccgaacctgggccctgcccacctacaacaaccacctttacaagcaaatctccagccaatcaggagcctcaaacgacaaccactactttggctacagcaccccctgggggtattttgacttcaacagattccactgccacttttcaccacgtgactggcaaagactcatcaacaacaactggggattccgacccaagagactcaacttcaagctctttaacattcaagtcaaagaggtcacgcagaatgacggtacgacgacgattgccaataaccttaccagcacggttcaggtgtttactgactcggagtaccagctcccgtacgtcctcggctcggcgcatcaaggatgcctcccgccgtttccagcggacgtcttcatggtcccacagtatggatacctcaccctgaacaacgggagtcaggcggtaggacgctcttccttttactgcctggagtgctttccttctcagatgctgcgtactggaaacaactttcagttcagctacacttttgaagacgtgcctttccacagcagctacgctcacagccagagtttggatcggctgatgaatcctctgatcgaccagtacctgtattatctaaacagaacacaaacagctagtggaactcagcagtctcggctactgtttagccaagctggacccacaagcatgtctcttcaagctaaaaactggctgcctggaccgtgttatcgccagcagcgtttgtcaaagcaggcaaacgacaacaacaacagcaactttccctggactggagctaccaagtaccacctcaatggcagagactctttggtgaacccgggcccggccatggccagccacaaggacgatgaagaaaagtttttccccatgcatggaaccctaatatttggtaaagaaggaacaaatgctaccaacgcggaattggaaaatgtcatgattacagatgaagaggaaatcaggaccaccaatcccgtggctacagagcagtacggatatgtgtcaaataatttgcaaaactcaaatactgctgcaagtactgaaactgtgaatcaccaaggagcattacctggtatggtgtggcaggatcgagacgtgtacctgcagggacccatttgggccaagattcctcacaccgatggacactttcatccttctccactgatgggaggttttggactcaaacacccgcctcctcagattatgatcaaaaacactcccgttccagccaatcctcccacaaacttcagttctgccaagtttgcttccttcatcacacagtattccacgggacaggtcagcgtggagatcgagtgggagctgcagaaggagaacagcaaacgctggaatcccgaaattcagtacacttccaactacaacaaatctgttaatgtggactttactgtggacactaatggtgtgtattcagagcctcgccccattggcaccagatacctgactcgtaatctgtaattgcttgttaatcaataaaccgtttaattcgtttcagttgaactttggtctctgcgaagggcgaattcgcggccgctaaattcaattcgcc

SEQ ID NO: 202 - protein, 735 aa, Artificial Sequence
  source: /note="Description of Artificial Sequence: Synthetic polypeptide"
MAADGYLPDWLEDTLSEGIRQWWKLKPGPPPPKPAERHKDDSRGLVLPGYKYLGPFNGLYKGEPVDEADAAALEHDKAYDRQLDSGDNPYLKYNHADAEFQERLKEDTSFGGNLGRAVFQAKKRVLEPLGLVGEPVKTAPGKKRPVEHSPVEPDSSSGTGKAGNQPARKRLNFGQTGDADSVPDPQPLGQPPAAPSGLGSTTMATGSGAPVADNNEGADGVGNSSGNWHCDSQWLGDRVITTSTRTWALPTYNNHLYKQISSQSGASNDNHYFGYSTPWGYFDFNRFHCHFSPRDRQRLINNNWGFRPKRLNFKLFNIQVKEVTQNDGTTTIANNLTSTVQVFTDSGYQLPYVLGLAHQGCLPPFPADVFMVPQYGYLTLNNGSQAVGRSSFYCLEYFPSQMLRTGNNFQFSYTFEDVPFHSSYAHSQSLDRLMNPLIDQYLYYLNKTQSNSGTLQQSRLLFSQAGPTSMSLQAKNWLPGPCYRQQRLSKQANDNNNSNFPWTAATKYHLNGRDSLVNPGPAMASHKDDEEKFFPMHGTLIFGKQGTNANDADLDNVMITDEEEIRTTNPVATEQYGYVSNNLQNSNTGPTTGTVNHQGALPGMVWQDRDVYLQGPIWAKIPHTDGHFHPSPLMGGFGLKHPPPQIMIKNTPVPANPPTNFSSAKFASFITQYSTGQVSVEIEWELQKEDSKRWNPEIQYTSNYNKPVNVDFTVDTNGVYSEPRPIGTRYLTRNL

SEQ ID NO: 203 - DNA, 2208 bp, Artificial Sequence
  source: /note="Description of Artificial Sequence: Synthetic polynucleotide"
atggctgccgatggttatcttccagattggctcgaggacactctctctgaaggaataagacagtggtggaagctcaaacctggcccaccaccaccaaagcccgcagagcggcataaggacgacagcaggggtcttgtgcttcctgggtacaagtacctcggacccttcaacggactctacaagggagagccggtcgacgaggcagacgccgcggccctcgagcacgacaaggcctacgaccggcagctcgacagcggagacaacccgtacctcaagtacaaccacgccgacgcggagtttcaggagcgccttaaagaagatacgtcttttgggggcaacctcggacgagcagtcttccaggccaaaaagagggttcttgaacctctgggcttggttggggagcctgttaaaacggctccgggaaaaaagaggccggtagagcactctcctgtggagccagactcctcctcgggaaccggaaaagcgggcaaccagcctgcaagaaaaagattgaattttggtcagactggagacgcagactccgtacctgacccccagcctctcggacagccaccagcagccccctctggtctgggatctactacaatggctacaggcagtggcgcaccagtggcagacaataacgagggtgccgatggagtgggtaattcctcaggaaattggcattgcgattcccaatggctgggcgacagagtcatcaccaccagcacccgaacctgggctctgcccacctacaataaccacctctacaagcaaatctccagccaatcaggagcctcaaacgacaaccactactttggctacagcaccccctgggggtattttgacttcaacagattccactgccacttttcaccacgtgaccggcaaagactcatcaacaacaactggggattccgaccaaaaagactcaacttcaagctctttaacattcaagtcaaagaggtcacgcagaatgacggtacgacgacgattgccaataaccttaccagcacggttcaggtgtttactgactcggggtaccagctcccgtacgtcctcggcttggcgcatcaaggatgcctcccgccgttcccagcagacgtcttcatggtgccacagtatggatacctcaccctgaacaacgggagtcaggcggtaggacgctcttccttttactgcctggagtactttccttctcagatgctgcgtactggaaacaactttcagttcagctacacctttgaagacgttcctttccacagcagctacgctcacagccagagtctggatcggctgatgaatcctctgatcgaccagtacctgtattatctgaacaagacacaatcaaatagtggaactcttcagcagtctcggctactgtttagccaagctggacccaccagcatgtctcttcaagctaaaaactggctgcctggaccttgctacagacagcagcgtctgtcaaagcaggcaaacgacaacaacaacagcaactttccctggactgcggctacaaagtatcatctaaatggccgggactcgttggttaatccaggaccagctatggccagccacaaagacgatgaagaaaagtttttccccatgcatggaaccctgatatttggtaaacaaggaacaaatgctaacgacgcggatttggacaatgtcatgattacagatgaagaagaaatccgcaccaccaatcccgtggctacggagcagtacggatatgtgtcaaataatttgcaaaactcaaatactggtccaactactggaactgtcaatcaccaaggagcgttacctggtatggtgtggcaggatcgagacgtgtacctgcagggacccatttgggccaagattcctcacaccgatggacactttcatccttctccacttatgggaggttttggactcaaacacccacctcctcagatcatgattaaaaacactcccgttccagccaatcctcccacaaacttcagttctgccaagtttgcttctttcatcacacagtattccacgggacaagtcagcgtggagatcgagtgggagctgcagaaggaggacagcaaacgctggaaccccgagatccagtacacttccaactataacaaacctgttaatgtggactttactgtggacactaatggtgtgtattcagagcctcgccccattggcaccagatacctgactcgtaatctgtaa

SEQ ID NO: 204 - DNA, 3161 bp, Artificial Sequence
  source: /note="Description of Artificial Sequence: Synthetic polynucleotide"
cgaattgatttagcggccgcgaattcgcccttcgcagagaccaaagttcaactgaaacgaattaaacggtttattgattaacaagcaattacagattacgagtcaggtatctggtgccaatggggcgaggctctgaatacacaccattagtgtccacagtaaagtccacattaacagatttgttgtagttggaagtgtactggatctcgggattccagcgtttgctgttctccttctgtagctcccactcgatctccacgctgacccgccccgtggaatactgtgtgatgaaggaagcaaactttgccgcactgaaggtggtcgaaggattcgcaggtaccggggtgtttttgatgagaatctgtggaggagggtgtttaagtccgaatccgcccatgaggggagaggggtgaaaatgtccgtccgtgtgcggaatctttgcccagataggcccctgcaggtacacgtctctgtcctgccagaccatgcctggaagaacgccttgtgtgttgacatctgcagtagatgcttgtgtgttgccgctctggaggttggtagatacagaaccatactgctccgtggccacgggattggtggttctgatttcctcttcgtctgtaatcatgaccttttcaatgtccacatttgttttctctgatccttgttttccaaagatgagaaccccgctctgaggaaaaaacttttcttcatcgtccttgtggctggccattgccgggcccggattcaccagagagtctctgccattgaggtggtacttggtagctccaatccacgagtattcactgttgttgttgtccgcagatgtctttgatactcgctgctggcggtaacagggtccaggaagccagttcctagactgatcccgaatgtcactcgctccggcctgagaaaactgaagcctggactgcgtggtggttccgcttggagtgtttgttctgctcaagtaatacaggtactggtcgatgagaggattcatgagacggtccaaactctggctgtgagcgtagctgctgtggaaaggaacatcctcaaaggtgtagctgaaggtaaagttgtttccggtacgcagcatctgagaagggaagtactccaggcagtaaaatgaagagcgtcctactgcctgactcccgttgttcagggtgaggtatccatactgtggcaccatgaagacgtctgctgggaacggcgggaggcatccttgatgcgccgagccgaggacgtacgggagctggtactccgagtcagtaaacacctgaaccgtgctggtaaggttattggcaatcgtcgtcgtaccatcattctgcgtgacctctctgacttgaatgttaaagagcttgaagttgagtctcttgggccggaatccccagttgttgttgatgagtctttgccagtcacgtggtgaaaagtggcagtggaatctgttgaagtcaaaatacccccaaggggtgctgtagccaaagtagtggttgtcgttgctggctcctgattggctggaaatctgcttgtacagatggttgttgtaggtgggcagagcccaggttcgggtgctggtggtgatgactctgtcgcccatccatgtggaatcgcaatgccaatttcccgaggaattacccactccgtcggcgccatcgttattgtctgccattggtgcgccactgcctgtagccatcgtattagttcccagaccagagggggctgctggtggctgtccgagaggctgggggtcaggtacggagtctgcgtctccagtctgaccgaaattcaatctctttcttgcaggctggttgcccgcttttccggttcccgaggaggagtctggctccacaggagagtgctctaccggcctcttttttcccggagccgtcttaacaggctcctcaaccaggcccagaggttcaagaaccctcttttttgcctggaagactgctcgtccgaggttgcccccaaaagacgtatcttctttaaggcgctcctgaaactccgcgtcggcgtggtcgtacttgaggtacgggttgtctccgctgtcgagctgccggtcgtaggccttgtcgtgctcgagggccgcggcgtctgcctcgttgaccggctctcccttgtcgagtccgttgaagggtccgaggtacttgtacccaggaagcacaagacccctgctgtcgtccttatgccgctctgcgggctttggtggtggtgggccaggtttgagcttccaccactgtcttattccttcagagagagtgtcctcgagccaatctggaagataaccatcggcagccatacctgatttaaatcatttattgttcagagatgcagtcatccaaatccacattgaccagatcgcaggcagtgcaagcgtctggcacctttcccatgatatgatgaatgtagcaaagtttctgatacgcctttttgacgacagaaacgggttgagattctgacacgggaaagcactctaaacagtctttctgtccgtgagtgaagcagatatttgaattctgattcattctctcgcattgtctgcagggaaacagcatcagattcatgcccacgtgacgagaacatttgttttggtacctgtccgcgtagttgatcgaagcttccgcgtctgacgtcgatggctgcgcaactgactcgcgcgcccgtttgggctcacttatatctgcgtcactgggggcgggtcttttcttggctccaccctttttgacgtagaattcatgctccacctcaaccacgtgatcctttgcccaccggaaaaagtctttcacttcctgcttggtgaccttcccaaagtcatgatccagacggcgggttagttcaaatttgaacatccggtcttgcaacggctgctggtgttcgaaggtcgttgagttcccgtcaatcacggcgcacatgttggtgttggaggtggcgatcacgggagtcgggtctatctgggccgaggacttgcacttttggtccacgcgcaccttgcttcctccgagaatggcttcggccgattccacgaccttggcggtcatctttccctcctcccaccagatcaccatcttgtcgacacagtcgttgaagggaaagttctcattggtccagttgacgcagcaagggcgaattcgtttaaacctgcaggaactagtcccttagtgagg

SEQ ID NO: 205 - protein, 735 aa, Artificial Sequence
  source: /note="Description of Artificial Sequence: Synthetic polypeptide"
MAADGYLPDWLEDTLSEGIRQWWKLKPGPPPPKPAERHKDDSRGLVLPGYKYLGPFNGLYKGEPVNEADAAALEHDKAYDRQLDSGDNPYLKYNHAGAEFQERLKEDTSFGGNLGRAVFQAKKRVLEPLGLVEEPVKTAPGKKRPVEHSPVEPDSSSGTGKAGNQPARKRLNFGQTGDADSVPDPQPLGQPPAAPSGLGSTTMATGSGAPVADNNEGADGVGNSSGNWHCDSQWLGDRVITTSTRTWALPTYNNHLYKQISSQSGASNDNHYFGYSTPWGYFDFNRFHCHFSPRDWQRLINNNWGFRPKRLNFKLFNIQVKEVTQNDGTTTIANNLTSTVQVFTDSEYQLPYVLGSAHQGCLPPFPADVFMVPQYGYLTLNNGSQAVGRSSFYCLEYFPSQMLRTGNNFQFSYTFEDVPFHSSYAHSQSLDRLMNPLIDQYLYYLNKTQSNSGTLQQSRLLFSQAGPTSMSLQAKNWLPGPCYRQQRLSKQANDNNNSNFPWTAATKYHLNGRDSLVNPGPAMASHKDDEEKFFPMHGTLIFGKQGTNANDADLDNVMITDEEEIRTTNPVATEQYGYVSNNLQDSNTGPTTGTVNHQGALPGMVWQDRDVYLQGPIWAKIPHTDGHFHPSPLMGGFGLKHPPPQIMIKNTPVPANPPTNFSSAKFASFITQYSTGQVSVEIEWELQKENSKRWNPEIQYTSNYNKSVNVDFTVDTNGVYSEPRPIGTRYLTRNL

SEQ ID NO: 206 - DNA, 2208 bp, Artificial Sequence
  source: /note="Description of Artificial Sequence: Synthetic polynucleotide"
atggctgccgatggttatcttccagattggctcgaggacactctctctgaaggaataagacagtggtggaagctcaaacctggcccaccaccgccaaagcccgcagagcggcataaggacgacagcaggggtcttgtgcttcctgggtacaagtacctcggacccttcaacggactctacaagggagagccggtcaacgaggcagacgccgcggccctcgagcacgacaaggcctacgaccggcagctcgacagcggagacaacccgtacctcaagtacaaccacgccggcgcggagtttcaggagcgccttaaagaagatacgtcttttgggggcaacctcggacgagcagtcttccaggccaaaaagagggttcttgaacctctgggcttggttgaggagcctgttaaaacggctccgggaaaaaagaggccggtagagcactctcctgtggagccagactcctcctcgggaaccggaaaagcgggcaaccagcctgcaagaaaaagattgaattttggtcagactggagacgcagactccgtacctgacccccagcctctcggacagccaccagcagccccctctggtctgggatctactacaatggctacaggcagtggcgcaccagtggcagacaataacgagggtgccgatggagtgggtaattcctcaggaaattggcattgcgattcccaatggctgggcgacagagtcatcaccaccagcacccgaacctgggctctgcccacctacaacaaccacctctacaagcaaatctccagccaatcaggagcctcaaacgacaaccactactttggctacagcaccccctgggggtattttgacttcaacagattccactgccacttttcaccacgtgactggcaaagactcatcaacaacaactggggattccgaccaaagagactcaacttcaagctctttaacattcaagtcaaagaggtcacgcagaatgacggtacgacgacgattgccaataaccttaccagcacggttcaggtgtttactgactcggagtaccagctcccgtacgtcctcggctcggcgcatcaaggatgcctcccgccgttcccagcagacgtcttcatggtgccacagtatggatacctcaccctgaacaacgggagtcaggcggtaggacgctcttccttttactgcctggagtactttccttctcagatgctgcgtactggaaacaactttcagttcagctacacctttgaagacgttcctttccacagcagctacgctcacagccagagtctggatcggctgatgaatcctctgatcgaccagtacctgtattatctgaacaagacacaatcaaatagtggaacccttcagcagtctcggctactgtttagccaagctggacccaccagcatgtctcttcaagctaaaaactggctgcctggaccttgctacagacagcagcgtctgtcaaagcaggcaaacgacaacaacaacagcaactttccctggactgcggctacaaagtatcatctaaatggccgggactcgttggttaatccaggaccagctatggccagccacaaagacgatgaagaaaagtttttccccatgcatggaaccctgatatttggtaaacaaggaacaaatgctaacgacgcggatttggacaatgtcatgattacagatgaagaagaaatccgcaccaccaatcccgtggctacggagcagtacggatatgtgtcaaataatttgcaagactcaaatactggtccaactactggaactgtcaatcaccaaggagcgttacctggtatggtgtggcaggatcgagacgtgtacctgcagggacccatttgggccaagattcctcacaccgatggacactttcatccttctccacttatgggaggttttggactcaaacacccacctcctcagatcatgattaaaaacactcccgttccagccaatcctcccacaaacttcagttctgccaagtttgcttctttcatcacacagtattccacgggacaagtcagcgtagagatcgagtgggagctgcagaaggagaacagcaaacgctggaaccccgagatccagtacacttccaactataacaaatctgttaatgtggactttactgtggacactaatggtgtgtattcagagcctcgccccattggcaccagatacctgactcgtaatctgtaa

SEQ ID NO: 207 - protein, 738 aa, Artificial Sequence
  source: /note="Description of Artificial Sequence: Synthetic polypeptide"
MAADGYLPDWLEDNLSEGIREWWDLKPGAPKPKANQQKQDDGRGLVLPGCKYLGPFNGLDKGEPVNAADAAALEHDKAYDQQLKAGDNPYLRYNHADAEFQERLQEDTSFGGNLGRAVFQAKKRVLEPLGLVEEGAKTAPGKKRPVEPSPQRSPDSSTGIGKTGQQPAKKRLNFGQTGDSESVPDPQPIGEPPAGPSGLGSGTMAAGGGAPMADNNEGADGVGSSSGNWHCDSTWLGDRVITTSTRTWALPTYNNHLYKQISNGTSGGSTNDNTYFGYSTPWGYFDFNRFHCHFSPRDWQRLINNNWGFRPKRLNFKLFNIQVKEVTQNEGTKTIANNLTSTIQVFTDSEYQLPYVLGSAHQGCPPPFPADVFMIPQYGYLTLNNGSQAVGRSSFYCLEYFPSQMRRTGNNFEFSYQFEDVPFHSSYAHSQSLDRLMNPLIDQYLYYLSRTQSTGGTAGTQQLLFSQAGPNNMSAQAKNWLPGPCYRQQRVSTTLSQNNNSNFAWTGATKYHLNGRDSLVNPGVAMATHKDDEERFFPSSGVLMFGKQGAGKDNVDYSSVMLTSEEEIKTTNPVATEQYGVVADNLQQQNAAPIVGAVNSQGALPGMVWQNRDVYLQGPIWAKIPHTDGNFHPSPLMGGFGLKHPPPQILIKNTPVPADPPTTFSQAKLASFITQYSTGQVSVEIEWELQKENSKRWNPEIQYTSNYNKSVNVDFTVDTNGVYSEPRPIGTRYLTRNL

SEQ ID NO: 208 - DNA, 2217 bp, Artificial Sequence
  source: /note="Description of Artificial Sequence: Synthetic polynucleotide"
atggctgccgatggttatcttccagattggctcgaggacaacctctctgagggcattcgcgagtggtgggacttgaaacctggagccccgaaacccaaagccaaccagcaaaagcaggacgacggccggggtctggtgcttcctggctgcaagtacctcggacccttcaacggactcgacaagggggagcccgtcaacgcggcggacgcagcggccctcgagcacgacaaggcctacgaccagcagctcaaagcgggtgacaatccgtacctgcggtataaccacgccgacgccgagtttcaggagcgtctgcaagaagatacgtcttttgggggcaacctcgggcgagcagtcttccaggccaagaagcgggttctcgaacctctcggtctggttgaggaaggcgctaagacggctcctggaaagaagagaccggtagagccatcaccccagcgttctccagactcctctacgggcatcggcaagacaggccagcagcccgcgaaaaagagactcaactttgggcagactggcgactcagagtcagtgcccgaccctcaaccaatcggagaaccccccgcaggcccctctggtctgggatctggtacaatggctgcaggcggtggcgctccaatggcagacaataacgaaggcgccgacggagtgggtagttcctcaggaaattggcattgcgattccacatggctgggcgacagagtcatcaccaccagcacccgaacctgggccctccccacctacaacaaccacctctacaagcaaatctccaacgggacatcgggaggaagcaccaacgacaacacctacttcggctacagcaccccctgggggtattttgactttaacagattccactgccacttctcaccacgtgactggcagcgactcatcaacaacaactggggattccggcccaagagactcaacttcaagctcttcaacatccaggtcaaggaggtcacgcagaatgaaggcaccaagaccatcgccaataaccttaccagcacgattcaggtctttacggactcggaataccagctcccgtacgtcctcggctctgcgcaccagggctgcccgcctccgttcccggcggacgtcttcatgattcctcagtacgggtacctgactctgaacaacggcagtcaggccgtgggccgttcctccttctactgcctggagtactttccttctcaaatgcggagaacgggcaacaactttgagttcagctaccagtttgaggacgtgccttttcacagcagctacgcgcatagccaaagcctggaccggctgatgaaccccctcatcgaccagtacctgtactacctgtctcggactcagtccacgggaggtaccgcaggaactcagcagttgctattttctcaggccgggcctaataacatgtcggctcaggccaaaaactggctacccgggccctgctaccggcagcaacgcgtctccacgacactgtcgcaaaataacaacagcaactttgcttggaccggtgccaccaagtatcatctgaatggcagagactctctggtaaatcccggtgtcgctatggcaacgcacaaggacgacgaagagcgattttttccatccagcggagtcttgatgtttgggaaacagggagctggaaaagacaacgtggactatagcagcgttatgctaaccagtgaggaagaaatcaaaaccaccaacccagtggccacagaacagtacggcgtggtggccgataacctgcaacagcaaaacgccgctcctattgtaggggccgtcaacagtcaaggagccttacctggcatggtctggcagaaccgggacgtgtacctgcagggtcctatctgggccaagattcctcacacggacggcaactttcatccttcgccgctgatgggaggctttggactgaaacacccgcctcctcagatcctgattaagaatacacctgttcccgcggatcctccaactaccttcagtcaagccaagctggcgtcgttcatcacgcagtacagcaccggacaggtcagcgtggaaattgaatgggagctgcagaaagagaacagcaagcgctggaacccagagattcagtatacttccaactataacaaatctgttaatgtggactttactgtggacactaatggtgtgtattcagagcctcgccccattggcaccagatacctgactcgtaatctgtaa

SEQ ID NO: 209 - DNA, 3167 bp, Artificial Sequence
  source: /note="Description of Artificial Sequence: Synthetic polynucleotide"
attgaatttagcggccgcgaattcgcccttcgcagagaccaaagttcaactgaaacgaattaaacggtttattgattaacaagcaattacagattacgagtcaggtacctggtgccaatggggcgaggctctgaatacacaccattagtgtccacagtaaagtccacattaacagatttgttgtagttggaagtgtactgaatctcgggattccagcgtttgctgttctccttctgcagctcccactcgatctccacgctgacctgccccgtggagtactgtgtaatgaaggaagcaaactttgccgcactgaaggtagtcgaaggattcgcaggtaccggggtgttcttgatgagaatctgcgggggagggtgtttaagtccgaatccgcccatgaggggagaggggtgaaaatgtccgtccgtgtgtggaatctttgcccagatgggcccctgcaggtacacgtctctgtcctgccacaccatgcctggaagaacgccttgtgtgttgacatctgaggtagctgcttgtgtgttgccgctctggaggttggtagatacagaaccatactgctccgtagccacgggattggtggtcctgatttcctcttcgtctgtaatcatgaccttttcaatgtccacattagtttttcccgagtcttgttttccaaagatgagaaccccgctctgaggaaaaaacttttcttcatcgtccttgtggctggccatggccgggcccggattcaccagagagtctcttccattaaggtggtacttggtagctccagtccacgagtattcactgttgttgttatccgcagatgtctttgatactcgctgctggcggtaacagggtccaggaagccagttcctagactggtcccgaatgtcacttgctccggcctgagaaaactgaagccttgactgcgtggtggttccgcttggagtgtttgttctgctcaagtaatacaggtactggtcgatgagaggattcatgagacggtccaaactctggctgtgggcgtagctgctgtggaaaggaacgtcctcaaaggtgtagctgaaggtaaagttgtttccggtacgcagcatctgagaaggaaagtactccaggcagtaaaatgaagagcgtcctactgcctgactcccgttgttcagggtgaggtatccatactgtggcaccatgaagacgtctgctgggaacggcgggaggcatccttgatgcgccgagccgaggacgtacgggagctggtactccgagtcagtaaacacctgaaccgtgctggtaaggttattggcaatcgtcgtcgtaccgtcattctgcgtgacctccttgacttgaatgttaaagagcttgaagttgagtcttttgggccggaatccccaattgttgttgatgagtctttgccagtcacgtggcgaaaagtggcagtggaatctgttgaagtcaaaatacccccaaggggtgctgtagccaaagtagtggttgtcgtttgaggctcctgattggctggaaatctgcttgtagaggtggttgttgtaggtgggcagagcccaggtgcgggtgctggtggtgatgactctgtcgcccatccatgtggaatcgcaatgccaatttcccgaggaattacccactccgtcggcgccctcgttattgtctgccattggtgcgccactgcctgtagccatcgtattagttcccagaccagagggggctgctggtggctgtccgagaggctgggggtcaggtacggagtctgcgtctccagtctgaccgaaattcaatctctttcttgcaggctgctggcccgcttttccggttcccgaggaggagtctggctccgcaggagagtgctctaccggcctcttttttcccggagccgtcttaacaggttcctcaaccaggcccagaggttcaagaaccctctttttcgcctggaagactgctcgtccgaggttgcccccaaaagacgtatcttctttaagacgctcctggaactccgcgtcggcgtggttgtacttggggtacgggttgtctccgctgtcgagctgccggtcgtaggccttgtcgtgctcgagggccgcggcgtctgcctcgttgaccggctctcccttgtcgagtccgttgaagggtccaaggtacttgtacccaggaagcacaagacccctgctgtcgtccttatgccgctctgcgggctttggtggtggtgggccaggtttgagcttccaccactgtcttattccttcagagagagtgtcctcgagccaatctggaagataaccatcggcagccatacctgatttaaatcatttattgttcagagatgcagtcatccaaatccacattgaccagatcgcaagcagtgcaagcgtctggcacctttcccatgatatgatgaatgtagcacagtttctgatacgcctttttgacgacagaaacgggttgagattctgacacgggaaagcactctaaacagtctttctgtccgtgagtgaagcagatatttgaattctgattcattctctcgcattgtctgcagggaaacagcatcagattcatgcccacgtgacgagaacatttgttttggtacctgtccgcgtagttgattgaagcttccgcgtctgacgtcgatggctgcgcaactgactcgcgcgcccgtttgggctcacttatatctgcgtcactgggggcgggtctttttttggctccaccctttttgacgtagaattcatgctctacctcaaccacgtgatcctttgcccaccggaaaaagtctttgacttcctgcttggtgaccttcccaaagtcatgatccagacggcgggtgagttcaaatttgaacatccggtcttgcaacggctgctggtgttcgaaggtcgttgagttcccgtcaatcactgcgcacatgttggtgttggaggtgacaatcacgggagtcgggtctatctgggccgaggacttgcatttctggtccacgcgcaccttgcttcctccgagaatggctttggccgactccacgaccttggcggtcatcttcccctcctcccaccagatcaccatcttgtcgacgcaatcattgaaaggaaagttctcattggtccagttgacgcagccgtagaaagggcgaattcgtttaaacctgcaggactagtccctttagtgagggt

SEQ ID NO: 210 - DNA, 3161 bp, Artificial Sequence
  source: /note="Description of Artificial Sequence: Synthetic polynucleotide"
aattgaatttagcggccgcgaattcgcccttcgcagagaccaaagttcaactgaaacgaattaaacggtttattgattaacaagcaattacagattacgagtcaggtatctggtgccaatggggcgaggctctgaatacacaccattagtgtccacagtaaagtccacattaacagatttgttgtagttggaagtgtactgaatctcgggattccagcgtttgctgttctccttctgcagctcccactcgatctccacgctgacctgccccgtggagtactgtgtaatgaaggaagcaaactttgccgcactgaaggtagtcgaaggattcgcaggtaccggggtgttcttgatgagaatctgcgggggagggtgtttaagtccgaatccgcccatgaggggagaggggtgaaaatgtccgtccgtgtgtggaatctttgcccagatgggcccctgcaggtacacgtctctgtcctgccacaccatgcctggaagaacgccttgtgtgttgacatctgaggtagctgcttgtgtgttgccgctctggaggttggtagatacagaaccatactgctccgtagccacgggattggtggtcctgatttcctcttcgtctgtaatcatgaccttttcaatgtccacattagtttttcccgagtcttgttttccaaagatgagaaccccgctctgaggaaaaaacttttcttcatcgtccttgtggctggccatggccgggcccggattcaccagagagtctcttccattaaggtggtacttggtagctccagtccacgagtattcactgttgttgttatccgcagatgtctttgatactcgctgctggcggtaacagggtccaggaagccagttcctagactggtcccgaatgtcacttgctccggcctgagaaaactgaagccttgactgcgtggtggttccgcttggagtgtttgttctgctcaagtaatacaggtactggtcgacgagaggattcatgagacggtccaaactctggctgtgggcgtagctgctgtggaaaggaacgtcctcaaaggtgtagctgaaggtaaagttgtttccggtacgcagcatctgagaaggaaagtactccaggcagtaaaatgaagagcgtcctactgcctgactcccgttgttcagggtgaggtatccatactgtggcaccatgaagacgtctgctgggaacggcgggaggcatccttgatgcgccgagccgaggacgtacgggagctggtactccgagtcagtaaacacctgaaccgtgctggtaaggttattggcaatcgtcgtcgtaccgtcattctgcgtgacctccttgacttgaatgttaaagagcttgaagttgagtcttttgggccgggatccccaattgttgttgatgagtctttgccagtcacgtggcgaaaagtggcagtggaatctgttgaagtcaaaatacccccaaggggtgctgtagccaaagtagtggttgtcgtttgaggctcctgattggctggaaatctgcctgtagaggtggttgttgtaggtgggcagagcccaggtgcgggtgctggtggtgatgactctgtcgcccatccatgtggaatcgcaatgccaatttcccgaggaattacccactccgtcggcgccctcgttattgtctgccattggtgcgccactgcctgtagccatcgtattagttcccagaccagagggggctgctggtggctgtccgagaggctgggggtcaggtacggagtctgcgtctccagtctgaccgaaattcaatctccttcttgcaggctgctggcccgcttttccggttcccgaggaggagtctggctccgcaagagagtgctctaccggcctcttttttcccggagccgtcttaacaggttcctcaaccaggcccagaggttcaagaaccctctttttcgcctggaagactgctcgtccgaggttgcccccaaaagacgtatcttctttaagacgctcctggaactccgcgtcggcgtggttgtacttgaggtacgggttgtctccgccgtcgagctgccggtcgtaggccttgtcgtgctcgagggccgcggcgtctgcctcgttgaccggctctcccttgtcgagtccgttgaagggtccaaggtacttgtacccaggaagcacaagacccctgctgtcgtccttatgccgctctgcgggctttggtggtggtgggccaggtttgagcttccaccactgtcttattccttcagagagagtgtcctcgagccaatctggaagataaccatcggcagccatacctgatttaaatcatttattgttcagagatgcagtcatccaaatccacattgaccagatcgcaagcagtgcaagcgtctggcacctttcccatgatatgatgaatgtagcacagtttctgatacgcctttttgacgacagaaacgggttgagattctgacacgggaaagcactctaaacagtctttctgtccgtgagtgaagcagatatttgaattctgattcattctctcgcattgtctgcagggaaacagcatcagattcatgcccacgtgacgagaacatttgttttggtacctgtccgcgtagttgattgaagcttccgcgtctgacgtcgatggctgcgcaactgactcgcgcgcccgtttgggctcacttatatctgcgtcactgggggcgggtctttttttggctccaccctttttgacgtagaattcatgctctacctcaaccacgtgatcctttgcccaccggaaaaagtctttgacttcctgcttggtgaccttcccaaagtcatgatccagacggcgggtgagttcaaatttgaacatccggtcttgcaacggctgctggtgttcgaaggtcgttgagttcccgtcaatcactgcgcacatgttggtgttggaggtgacaatcacgggagtcgggtctatctgggccgaggacttgcatttctggtccacgcgcaccttgcttcctccgagaatggctttggccgactccacgaccttggcggtcatcttcccctcctcccaccagatcaccatcttgtcgacgcaatcattgaaaggaaagttctcattggtccagttgacgcagcaagggcgaattcgtttaaacctgcaggactagtccctttagtgaggg

SEQ ID NO: 211 - DNA, 3172 bp, Artificial Sequence
  source: /note="Description of Artificial Sequence: Synthetic polynucleotide"
gattgaatttagcggccgcgaattcgcccttgctgcgtcaactggaccaatgagaactttcccttcaacgattgcgtcgacaagatggtgatctggtgggaggagggcaagatgaccgccaaggtcgtggagtccgccaaggccattctgggtggaagcaaggtgcgcgtggaccaaaagtgcaagtcatcggcccagatcgaccccacgcccgtgatcgtcacctccaacaccaacatgtgcgccgtgatcgacgggaacagcaccaccttcgagcaccagcagcccctgcaggaccgcatgttcaagttcgagctcacccgccgtctggagcacgactttggcaaggtgaccaagcaggaagtcaaagagttcttccgctgggctcaggatcacgtgactgaggtggcgcatgagttctacgtcagaaagggcggagccaccaaaagacccgcccccagtgacgcggatataagcgagcccaagcgggcctgcccctcagttgcggagccatcgacgtcagacgcggaagcaccggtggactttgcggacaggtaccaaaacaaatgttctcgtcacgcgggcatgcttcagatgctgtttccctgcaagacatgcgagagaatgaatcagaatttcaacgtctgcttcacgcacggggtcagagactgctcagagtgcttccccggcgcgtcggaatctcaacccgtcgtcagaaaaaagacgtatcagaaactgtgcgcgattcatcatctgctggggcgggcacccgagattgcgtgttcggcctgcgatctcgtcaacgtggacttggatgactgtgtttctgagcaataaatgacttaaaccaggtatggctgctgacggttatcttccagattggctcgaggacaacctctctgagggcattcgcgagtggtgggacctgaaacctggagcccccaagcccaaggccaaccagcagaagcaggacgacggccggggtctggtgcttcctggctacaagtacctcggacccttcaacggactcgacaagggggagcccgtcaacgcggcggacgcagcggccctcgagcacgacaaggcctacgaccagcagctcaaagcgggtgacaatccgtacctgcggtataaccacgccgacgccgagtttcaggagcgtctgcaagaagatacgtcttttgggggcaacctcgggcgagcagtcttccaggccaagaagcgggttctcgaacctctcggtctggttgaggaagctgctaagacggctcctggaaagaagagaccggtagaaccgtcacctcagcgttcccccgactcctccgcgggcatcggcaagaaaggccagcagcccgctaaaaagagactgaactttggtcagactggcgactcagagtcagtccccgaccctcaaccaatcggagaaccaccagcaggcccctctggtctgggatctggtacaatggctgcaggcggtggcgctccaatggcagacaataacgaaggcgccgacggagtgggtagttcctcaggaaattggcattgcgattccacatggctgggcgacagagtcatcaccaccagcacccgaacctgggccctgcccacctacaacaaccacctctacaagcaaatatccaatgggacatcgggaggaagcaccaacgacaacacctacttcggctacagcaccccctgggggtattttgacttcaacagattccactgccacttctcaccacgtgactggcagcgactcatcaacaacaactggggattccggccaaaaagactcagcttcaagctcttcaacatccaggtcaaggaggtcacgcagaatgaaggcaccgagaccatcgccaataaccttaccagcacgattcaggtatttacggactcggaataccagctgccgtacgtcctcggctccgcgcaccagggctgcctgcctccgttcccggcggacgtcttcatgattccccagtacggctaccttacactgaacaatggaagtcaagccgtaggccgttcctccttctactgcctggaatattttccatctcaaatgctgcgaactggaaacaattttgaattcagctacaccttcgaggacgtgcctttccacagcagctgcgcacacagccagagctcggaccgactgatgaatcctctcatcgaccagtacctgtactacttatccagaactcggtccacaggaggaactcaaggtacccagcaattgttattttctcaagctgggcctgcaaacatgtcggctcaggctaagaactggctacctggaccttgctaccggcagcagcgagtctctacgacactgtcgcaaaacaacaacagcaactttgcttggactggtgccaccaaatatcacctgaacggaagagactctttggtaaatcccggtgtcgccatggcaacccacaaggacgacgaggaacgcttcttcccgtcgagtggagtcctgatgtttggaaaacagggtgctggaagagacaatgtggactacagcagcgttatgctaaccagcgaagaagaaattaaaaccactaaccctgtagccacagaacaatacggtgtggtggctgacaacttgcagcaaaccaatacagggcctattgtgggaaatgtcaacagccaaggagccttacctggcatggtctggcagaaccgagacgtgtacctgcagggtcccatctgggccaagattcctcacacggacggcaacttccacccttcaccgctaatgggaggatttggactgaagcacccacctcctcagatcctgatcaagaacacgccggtacctgcggatcctccaacaacgttcagccaggcgaaattggcttccttcattacgcagtacagcaccggacaggtcagcgtggaaatcgagtgggagctgcagaaggagaacagcaaacgctggaacccagagattcagtacacttcaaactactacaaatctacaaatgtggactttgctgtcaatacagagggaacttattctgagcctcgccccattggtactcgttacctcacccgtaatctgtaattgctggttaatcaataaaccgtttgattcgtttcagttgaactttggtctctgcgaagggcgaattcgtttaaacctgcaggactagtccctttagtgagg

SEQ ID NO: 212 - DNA, 3172 bp, Artificial Sequence
  source: /note="Description of Artificial Sequence: Synthetic polynucleotide"
gattgaatttagcggccgcgaattcgcccttgctgcgtcaactggaccaatgagaactttcccttcaacgattgcgtcgacaagatggtgatctggtgggaggagggcaagatgaccgccaaggtcgtggagtccgccaaggccattctgggtggaagcaaggtgcgcgtggaccaaaagtgcaagtcatcggcccagatcgaccccacgcccgtgatcgtcacctccaacaccaacatgtgcgccgtgatcggcgggaacagcaccaccttcgagcaccagcagcccctgcaggaccgcatgttcaagttcgagctcacccgccgtctggagcacgactttggcaaggtgaccaagcaggaagtcaaagagttcttccgctgggctcaggatcacgtgactgaggtggcgcatgagttctacgtcagaaagggcggagccaccaaaagacccgcccccagtgacgcggatataagcgagcccaagcgggcctgcccctcagttgcggagccatcgacgtcagacgcggaagcaccggtggactttgcggacaggtaccaaaacaaatgttctcgtcacgcgggcatgcttcagatgctgtttccctgcaagacatgcgagagaatgaatcagaatttcaacgtctgcttcacgcacggggtcagagactgctcagagtgcctccccggcgcgtcagaatctcaacccgtcgtcagaaaaaagacgtatcagaaactgtgcgcgattcatcatctgctggggcgggcacccgagattgcgtgttcggcctgcgatctcgtcaacgtggacttggatgactgtgtttctgagcaataaatgacttaaaccaggtatggctgctgacggttatcttccagattggctcgaggacaacctctctgagggcattcgcgagtggtgggacctgaaacctggagcccccaagcccaaggccaaccagcagaagcaggacgacggccggggtctggtgcttcttggctacaagtacctcggacccttcaacggactcgacaagggggagcccgtcaatgcggcggacgcagcggccctcgagcacgacaaggcctacgaccagcagctcaaagcgggtgacaatccgtacctgcggtataaccacgccgacgccgagtttcaggagcgtctgcaagaagatacgtcttttgggggcaacctcgggcgagcagtcttccaggccaagaagcgggttctcgaacctctcggtctggttgaggaagctgctaagacggctcctggaaagaagagaccggtagaaccgtcacctcagcgttcccccgactcctccacgggcatcggcaagaaaggccagcagcccgctaaaaagagactgaactttggtcagactggcgactcagagtcagtccccgaccctcaaccaatcggagaaccaccagcaggcccctctggtctgggatctggtacaatggctgcaggcggtggcgctccaatggcagacaataacgaaggcgccgacggagtgggtagttcctcaggaaattggcattgcgattccacatggctgggcgacagagtcatcaccaccagcacccgaacctgggccctgcccacctacaacaaccacctctacaagcaaatatccaatgggacatcgggaggaagcaccaacgacaacacctacttcggctacagcaccccctgggggtattttgacttcaacagattccactgccacttctcaccacgtgactggcagcgactcatcaacaacaactggggattccggccaaaaagactcagcttcaagctcttcaacatccaggtcaaggaggtcacgcagaatgaaggcaccaagaccatcgccaataaccttaccagcacgattcaggtatttacggactcggaataccagctgccgtacgtcctcggctccgcgcaccagggctgcctgcctccgttcccggcggacgtcttcatgattccccagtacggctaccttacactgaacaatggaagtcaagccgtaggccgttcctccttctactgcctggaatattttccatctcaaatgctgcgaactggaaacaattttgaattcagctacaccttcgaggacgtgcctttccacagcggctacgcacacagccagagcttggaccgactgatgaatcctctcatcgaccagtacctgtactacttatccagaactcagtccacaggaggaactcaaggtacccagcaattgttattttctcaagctgggcctgcaaacatgtcggctcaggctaagaactggctacctggaccttgctaccggcagcagcgagtctctacgacactgtcgcaaaacaacaacagcaactttgcttggactggtgccaccaaatatcacctgaacggaagagactctttggtaaatcccggtgtcgccatggcaacccacaaggacgacgaggaacgcttcttcccgtcgagtggagtcctgatgtttggaaaacagggtgctggaagagacaatgtggactacagcagcgttatgctaaccagcgaagaagaaattaaaaccactaaccctgtagccacagaacaatacggtgtggtggctgacaacttgcagcaaaccaatacagggcctattgtgggaaatgtcaacagccaaggagccttacctggcatggtctggcagaaccgagacgtgtacctgcagggtcccatctgggccaagattcctcacacggacggcaacttccacccttcaccgctaatgggaggatttggactgaagcacccacctcctcagatcctgatcaagaacacgccggtacctgcggatcctccaacgacgttcagccaggcgaaattggcttccttcattacgcagtacagcaccggacaggtcagcgtggaaatcgagtgggagctgcagaaggagaacagcaaacgctggaacccagagattcagtacacttcaaactactacaaatctacaaatgtggactttgctgtcaatacagagggaacttattctgagcctcgccccattggtactcgttacctcacccgtaatctgtaattgctggttaatcaataaaccgtttgattcgtttcagttgaactttggtctctgcgaagggcgaattcgtttaaacctgcaggactagtccctttagtgagg

SEQ ID NO: 213 - DNA, 2208 bp, Artificial Sequence
  source: /note="Description of Artificial Sequence: Synthetic polynucleotide"
atggctgccgatggttatcttccagattggctcgaggacactctctctgaaggaataagacagtggtggaagctcaaacctggcccaccaccaccaaagcccgcagagcggcataaggacgacagcaggggtcttgtgcttcctgggtacaagtacctcggacccttcaacggactcgacaagggagagccggtcaacgaggcagacgccgcggccctcgagcacgacaaggcctacgaccggcagctcgaaagcggagacaacccgtacctcaagtacaaccacgccgacgcggagtttcaggagcgtcttaaagaagatacgtcttttgggggcaacctcggacgagcagtcttccaggcgaaaaagagggttcttgaacctctgggcctggttgaggagcctgttaaaacggctccgggaaaaaagaggccggtagagcactctcctgtggagccagactcctcctcgggaaccggaaaagcgggccagcagcctgcgagaaaaagattgaattttggtcagactggagacgcagactccgtacctgacccccagcctctcggacagccaccagcagccccctctggtctgggatctactacaatggcttcaggcagtggcgcaccagtggcagacaataacgagggtgccgatggagtgggtaattcctcaggaaattggcattgcgattcccaatggctgggcgacagagtcatcaccaccagcacccgaacctgggccctgcccacctacaacaaccacctctacaagcaaatctccagccaatcaggagcctcaaacgacaaccactactttggctacagcaccccctgggggtattttgacttcaacagattccactgccacttttcaccacgtgactggcaaagactcatcaacaacagctggggattccgacccaaaagactcaacttcaagctctttaacattcaagtcaaagaggtcacgcagaatgacggtacgacgacgattgccaataaccttaccagcacggttcaagtgtttaccgactcggagtaccagctcccgtacgtcctcggctcggcgcatcaaggatgcctcccgccgttcccagcagacgtctttatggtcccacagtatggatacctcaccctgaacaacgggagtcaggcggtaggacgctcttccttttactgcctggagtactttccttctcagatgctgcgtactggaaacaactttcagttcagctacacctttgaagacgttcccttccacagcagctacgctcacagccagagtctggatcggctgctgaatcctctgatcgaccagtacctatattatctgaacaagacacaatcaaatagtggaactcttcagcagtctcggctactgtttagccaagctggacccaccagcatgtctcttcaagctaaaaactggctgcctggaccttgctacagacagcagcgtctgtcaaagcaggcaaacgacaacaacaacagcaactttccctggactgcggctacaaagtatcatctaaatggccgggactcgttggttaatccaggaccagctatggccagccacaaagacgatgaagaaaagtttttccccatgcatggaaccctgatatttggtaaacaaggaacaaatgctaacgacgcggatttggacaatgtcatgattacagatgaagaagaaatccgcaccaccaatcccgtggctacggagcagtacggatatgtgtcaaataatttgcaaaactcaaatactggtccaactactggaactgtcaatcaccaaggagcgttacctggtatggtgtggcaggatcgagacgtgtacctgcagggacccatttgggccaagattcctcacacggacgggcactttcatccttctccactaatgggaggttttgggctcaaacacccgcctcctcagatcatgatcaaaaacactcccgttccagccaatcctcctacaaacttcagttcttccaagtttgcttctttcatcacacagtattccacggggcaggtcagcgtggagatcgagtgggagctgcagaaggagaacagcaaacgctggaatcccgaaattcagtatacttccaactacaacaaatctgttaatgtggactttactgtggacactaatggtgtgtattcagagcctcgccccattggcaccagatacccgactcgtaatctgtaa

SEQ ID NO: 214 - protein, 735 aa, Artificial Sequence
  source: /note="Description of Artificial Sequence: Synthetic polypeptide"
MAADGYLPDWLEDTLSEGIRQWWKLKPGPPPPKPAERHKDDSRGLVLPGYKYLGPFNGLDKGEPVNEADAAALEHDKAYDRQLESGDNPYLKYNHADAEFQERLKEDTSFGGNLGRAVFQAKKRVLEPLGLVEEPVKTAPGKKRPVEHSPVEPDSSSGTGKAGQQPARKRLNFGQTGDADSVPDPQPLGQPPAAPSGLGSTTMASGSGAPVADNNEGADGVGNSSGNWHCDSQWLGDRVITTSTRTWALPTYNNHLYKQISSQSGASNDNHYFGYSTPWGYFDFNRFHCHFSPRDWQRLINNSWGFRPKRLNFKLFNIQVKEVTQNDGTTTIANNLTSTVQVFTDSEYQLPYVLGSAHQGCLPPFPADVFMVPQYGYLTLNNGSQAVGRSSFYCLEYFPSQMLRTGNNFQFSYTFEDVPFHSSYAHSQSLDRLLNPLIDQYLYYLNKTQSNSGTLQQSRLLFSQAGPTSMSLQAKNWLPGPCYRQQRLSKQANDNNNSNFPWTAATKYHLNGRDSLVNPGPAMASHKDDEEKFFPMHGTLIFGKQGTNANDADLDNVMITDEEEIRTTNPVATEQYGYVSNNLQNSNTGPTTGTVNHQGALPGMVWQDRDVYLQGPIWAKIPHTDGHFHPSPLMGGFGLKHPPPQIMIKNTPVPANPPTNFSSSKFASFITQYSTGQVSVEIEWELQKENSKRWNPEIQYTSNYNKSVNVDFTVDTNGVYSEPRPIGTRYPTRNL

SEQ ID NO: 215 - DNA, 2208 bp, Artificial Sequence
  source: /note="Description of Artificial Sequence: Synthetic polynucleotide"
atggctgccgatggttatcttccagattggctcgaggacactctctctgaaggaataagacagtggtggaagctcaaacctggcccaccaccaccaaagcccgcagagcggcataaggacgacagcaggggtcttgtgcttcctgggtacaagtacctcggacccttcaacggactcgacaagggagagccggtcaacgaggcagacgccgcggccctcgagcacgacaaggcctacgaccggcagctcgacagcggagacaacccgtacctcaagtacaaccacgccgacgcggagtttcaggagcgtcttaaagaagatacgtcttttgggggcaacctcggacgagcagtcttccaggccaaaaagaggattcttgaacctctgggcctggttgaggaacctgttaagacggctccgggagaaaagaggccggtagagcactctcctgcggagccagactcctcctcgggaaccggaaaagcgggccagcagcctgcaagaaagagattgaattttggccagactggagacgcagactcagtacctgacccccagcctctcggacagccaccagcagccccctctggtctgggaactaatacgatggcttcaggcagtggcgcaccaatggcagacaataacgagggcgccgacggagtgggtaattcctcgggaaattggtattgcgattccacatggatgggcgacagagtcatcaccaccagcacccgcacctgggccctgcccacctacaacaaccatctgtacaagcaaatctccagccagtctggagccagcaacgacaaccactactttggctacagcaccccctgggggtattttgacttcaacagattccactgccacttctccccacgtgactggcaaagactcatcaacaacaactggggattccggcccaagagactcagcttcaagctctttaacattcaagtcaaagaggtcacgcagaatgacggtacgacgacgattgccaataaccttaccagcacggttcaggtgtttactgactcggagtaccagctcccgtacgtcctcggctcggcgcatcaaggatgcctcccgccgttcccagcagacgtcttcatggtgccacagtatggatacctcaccctgaacaacggcagtcaggcggtaggacgctcttccttttactgcctggagtactttccttctcagatgcttcgtaccggaaacaactttaccttcagctacacctttgaagacgttcctttccatagcagctacgctcacagccaaagtctggaccgtctcatgaatcctctcatcgaccagtacctgtattacttgagcagaacaaacactccaagcggaaccaccacgatgtccaggcttcagttttctcaggccggagcaagtgacattcgggaccagtctagaaactggcttcctggaccctgttaccgccagcagcgagtatcaaagacagctgcggacaacaacaacagtgattactcgtggactggagctaccaagtaccacctcaatggaagagactctctggtgaatccgggcccagctatggccagccacaaggacgatgaagaaaaatattttcctcagagcggggttctcatctttggaaaacaagactcgggaaaaactaatgtggacattgaaaaggttatgattacagacgaagaggaaatcaggaccaccaatcccgtggctacggagcagtatggttctgtatctaccaacctccagagcggcaacacacaagcagctacctcagatgtcaacacacaaggcgttcttccaggcatggtctggcaggacagagacgtgtacctgcaggggcccatctgggcaaagattccacacacggacggacattttcacccctctcccctcgtgggcggattcggacttaaacaccctcctccacaaattctcatcaagaacaccccggtacctgcgaatccttcgaccactttcagtgcggcaaagtttgcttccttcatcacacagtactccacggggcaggtcagcgtggagatcgagtgggagctgcagaaggagaacagcaaacgctggaatcccgaaattcagtacacttccaactacaacaaatctgttaatgtggactttactgtggacactaatggtgtgtattcagagcctcgccccattggcaccagatacctgactcgtaatctgtaa

SEQ ID NO: 216 - protein, 735 aa, Artificial Sequence
  source: /note="Description of Artificial Sequence: Synthetic polypeptide"
MAADGYLPDWLEDTLSEGIRQWWKLKPGPPPPKPAERHKDDSRGLVLPGYKYLGPFNGLDKGEPVNEADAAALEHDKAYDRQLDSGDNPYLKYNHADAEFQERLKEDTSFGGNLGRAVFQAKKRILEPLGLVEEPVKTAPGEKRPVEHSPAEPDSSSGTGKAGQQPARKRLNFGQTGDADSVPDPQPLGQPPAAPSGLGTNTMASGSGAPMADNNEGADGVGNSSGNWYCDSTWMGDRVITTSTRTWALPTYNNHLYKQISSQSGASNDNHYFGYSTPWGYFDFNRFHCHFSPRDWQRLINNNWGFRPKRLSFKLFNIQVKEVTQNDGTTTIANNLTSTVQVFTDSEYQLPYVLGSAHQGCLPPFPADVFMVPQYGYLTLNNGSQAVGRSSFYCLEYFPSQMLRTGNNFTFSYTFEDVPFHSSYAHSQSLDRLMNPLIDQYLYYLSRTNTPSGTTTMSRLQFSQAGASDIRDQSRNWLPGPCYRQQRVSKTAADNNNSDYSWTGATKYHLNGRDSLVNPGPAMASHKDDEEKYFPQSGVLIFGKQDSGKTNVDIEKVMITDEEEIRTTNPVATEQYGSVSTNLQSGNTQAATSDVNTQGVLPGMVWQDRDVYLQGPIWAKIPHTDGHFHPSPLVGGFGLKHPPPQILIKNTPVPANPSTTFSAAKFASFITQYSTGQVSVEIEWELQKENSKRWNPEIQYTSNYNKSVNVDFTVDTNGVYSEPRPIGTRYLTRNL

SEQ ID NO: 217 - DNA, 2209 bp, Artificial Sequence
  source: /note="Description of Artificial Sequence: Synthetic polynucleotide"
atggctgccgatggttatcctccagattggctcgaggacactctctctgaagggataagacagtggtggaagctcaaacctggcccaccaccaccaaagcccgcagagcggcataaggacgacagcaggggtcttgtgcttcctgggtacaagtacctcggacccttcaacggactcgacaagggggagccggtcaacgaggcagacgccgcggccctcgagcacgacaaggcctacgaccggcagctcgacagcggagacaacccgtacctcaagtacaaccacgccgacgcagagtttcaggagcgccttaaagaagatacgtcttttgggggcaacctcggacgagcagtcttccaggcgaaaaagagggttcttgaacctctgggcctggttgaggaacctgttaagacggctccgggaaaaaagaggccggtagagcactctcctgtggagccagactcctcctcgggaaccggaaaagcgggccagcggcctgcaagaaaaagattaaattttggtcagactggagacgcagactccgtacctgacccccagcctctcggacagccaccagcagccccctctggtctgggatctactacaatggctacaggcagtggcgcaccaatggcagacaataacgagggtgccgatggagtgggtaattcctcaggaaattggcattgcgattcccaatggctgggcgacagagtcatcaccaccagcacccgaacctgggccctgcccacatacaacaaccacctctacaagcaaatctccagccaatcaggagccagcaacgacaaccactactttggctacagcaccccctgggggtattttgacttcaacagattccactgccacttttcaccacgtgactggcaaagactcatcaacaacaactggggattccggcccaaaagactcaacttcaagctctttaatattcaagtcaaagaggtcacgcagaatgacggtacgacgacgattgccaataaccttaccagcacggttcaggtgtttactgactcggagtaccagctcccgtacgtcctgggctcggcgcatcaaggatgcctcccgccgtttccagcggacgtcttcatggtcccacagtatggatacctcaccctgaacaacgggagtcaggcggtaggacgctcttccttttactgcctggagtactttccttctcagatgctgcgtactggaaacaactttcagttcagctacacttttgaagacgtgcctttccacagcagctacgctcacagccagagtctggatcggctgatgaatcctctgatcgaccagtacctgtattatctgaacaagacacaaacaaatagtggaactcttcagcagtctcggctactgtttagccaagctggaccaaccaacatgtctcttcaagctaaaaactggctgcctggaccttgctacagacagcagcgtctgtcaaaacaggcaaacgacaacaacaacagcaactttccctggactgcagctacaaagtatcatctaaatggccgggactcgttggttaatccaggaccagctatggccagtcacaaggatgacgaagaaaagtttttccccatgcatggaaccctgatatttggtaaacaaggaacaaatgccaacgacgcggatttggaaaatgtcatgattacagatgaagaagaaatcagggccaccaatcccgtggctacggagcagtacgggactgtgtcaaataatttgcaaaactcaaacactggtccaactactggaactgtcaatcgccaaggagcgttacctggtatggtgtggcaggatcgagacgtgtacctgcagggacccatttgggccaagattcctcacaccgatggacactttcatccttctccactgatgggaggttttggactcaaacacccgcctcctcagatcatgatcaaaaacactcccgttccagccaatcctcccacaaacttcagttctgccaagtttgcttctttcatcacacagtattccacgggacaggtcagcgtggagatcgagtgggagctgcagaaggagaacagcaaacgctggaatcccgaaattcagtacacttccaactacaacaagtctgttaatgtggactttactgtggacactaatggtgtgtattcagagcctcgccccattggcaccagatacctgactcgtaatctgtaat

SEQ ID NO: 218 - protein, 735 aa, Artificial Sequence
  source: /note="Description of Artificial Sequence: Synthetic polypeptide"
MAADGYPPDWLEDTLSEGIRQWWKLKPGPPPPKPAERHKDDSRGLVLPGYKYLGPFNGLDKGEPVNEADAAALEHDKAYDRQLDSGDNPYLKYNHADAEFQERLKEDTSFGGNLGRAVFQAKKRVLEPLGLVEEPVKTAPGKKRPVEHSPVEPDSSSGTGKAGQRPARKRLNFGQTGDADSVPDPQPLGQPPAAPSGLGSTTMATGSGAPMADNNEGADGVGNSSGNWHCDSQWLGDRVITTSTRTWALPTYNNHLYKQISSQSGASNDNHYFGYSTPWGYFDFNRFHCHFSPRDWQRLINNNWGFRPKRLNFKLFNIQVKEVTQNDGTTTIANNLTSTVQVFTDSEYQLPYVLGSAHQGCLPPFPADVFMVPQYGYLTLNNGSQAVGRSSFYCLEYFPSQMLRTGNNFQFSYTFEDVPFHSSYAHSQSLDRLMNPLIDQYLYYLNKTQTNSGTLQQSRLLFSQAGPTNMSLQAKNWLPGPCYRQQRLSKQANDNNNSNFPWTAATKYHLNGRDSLVNPGPAMASHKDDEEKFFPMHGTLIFGKQGTNANDADLENVMITDEEEIRATNPVATEQYGTVSNNLQNSNTGPTTGTVNRQGALPGMVWQDRDVYLQGPIWAKIPHTDGHFHPSPLMGGFGLKHPPPQIMIKNTPVPANPPTNFSSAKFASFITQYSTGQVSVEIEWELQKENSKRWNPEIQYTSNYNKSVNVDFTVDTNGVYSEPRPIGTRYLTRNL

SEQ ID NO: 219 - DNA, 2208 bp, Artificial Sequence
  source: /note="Description of Artificial Sequence: Synthetic polynucleotide"
atggctgccgatggttatcttccagattggctcgaggacactctctctgaaggaataagacagtggtggaagctcaaacctggcccaccaccaccaaagcccgcagagcggcataaggacgacagcaggggtcttgtgcttcctgggtacaggtacctcggacccttcaacggactcgacaagggagagccggtcaacgaggcagacgccgcggccctcgagcacgacaaggcctacgaccggcagctcgacagcggagacaacccgtacctcaagtacaaccacgtcgacgcggagtttcaggagcgtcttaaagaagatacgtcttttgggggcaacctcggacgagcagtcttccaggccaaaaagaggattcttgaacctctgggcctggttgaggaacctgttaaggcggctccgggagaaaagaggccggtagagcactctcctgcggagccagactcctcctcgggaaccggaaaagcgggccagcagcctgcaagaaagagattgaattttggtcagactggagacgcagactcagtacctgacccccagcctctcggacagccaccagcagccccctctggtctgggaactaatacgatggcttcaggcagtggcgcaccaatggcagacaataacgagggcgccgacggagtgggtaattcctcgggaaattggcattgcgattccacatggatgggcgacagagtcatcaccaccagcacccgcacctgggccctgcccacctacaacaaccatctgtacaagcaaatctccagccagtctggagccagcaacgacaaccactactttggctacagcaccccctgggggcattttgacttcaacagattccactgccacttctccccacgtgactggcaaagactcatcaacaacaactggggattccggcccaagagactcagcttcaagctctttaacattcaagtcaaagaggtcacgcagaatgacggtacgacgacgattgccaataaccttaccagcacggttcaggtgtttactgactcggagtaccagctcccgtacgtcctcggctcggcgcatcaaggatgcctcccgccgttcccagcagacgtcttcatggtgccacagtatggatacctcaccctgaacaacggcagtcaggcggtaggacgctcttccttttactgcctggagtactttccttctcagatgcttcgtaccggaaacaactttaccttcagctacacctttgaagacgttcctttccatagcagctacgctcacagccaaagtctggaccgtctcatgaatcctctcatcgaccagtacctgtattacttgagcagaacaaacactccaagcggaaccaccacgatgtccaggcttcagttttctcaggccggagcaagtgacattcgggaccagtctagaaactggcttcctggaccctgttaccgccagcagcgagtatcaaagacagctgcggacaacaacaacagtgattactcgtggactggagctaccaagtaccacctcaatggaagagactctctggtgaatccgggcccagctatggccagccacaaggacgatgaagaaaaatattttcctcagagcggggttctcatctttggaaaacaagactcgggaaaaactaatgtggacattgaaaaggttatgattacagacgaagaggaaatcaggaccaccaatcccgtggctacggagcagtatggttctgtatctaccaacctccagagcggcaacacacaagcagctacctcagatgtcaacacacaaggcgttcttccaggcatggtctggcaggacagagacgtgtacctgcaggggcccatctgggcaaagattccacacacggacggacattttcacccctctccccccatgggcggattcggacttaaacaccctcctccacaaattctcatcaagaacaccccggtacctgcgaatccttcgaccactttcagtgcggcaaagtttgcttccttcatcacacagtactccacggggcaggtcagcgtggagatcgagtgggagctgcagaaggagaacagcaaacgctggaatcccgaaattcagtacacttccaactacaacaaatctgttaatgtggactttactgtggacactaatggtgtgtattcagagcctcgccccattggcgccagatacctgactcgtaatctgtaa

SEQ ID NO: 220 - protein, 735 aa, Artificial Sequence
  source: /note="Description of Artificial Sequence: Synthetic polypeptide"
MAADGYLPDWLEDTLSEGIRQWWKLKPGPPPPKPAERHKDDSRGLVLPGYRYLGPFNGLDKGEPVNEADAAALEHDKAYDRQLDSGDNPYLKYNHVDAEFQERLKEDTSFGGNLGRAVFQAKKRILEPLGLVEEPVKAAPGEKRPVEHSPAEPDSSSGTGKAGQQPARKRLNFGQTGDADSVPDPQPLGQPPAAPSGLGTNTMASGSGAPMADNNEGADGVGNSSGNWHCDSTWMGDRVITTSTRTWALPTYNNHLYKQISSQSGASNDNHYFGYSTPWGHFDFNRFHCHFSPRDWQRLINNNWGFRPKRLSFKLFNIQVKEVTQNDGTTTIANNLTSTVQVFTDSEYQLPYVLGSAHQGCLPPFPADVFMVPQYGYLTLNNGSQAVGRSSFYCLEYFPSQMLRTGNNFTFSYTFEDVPFHSSYAHSQSLDRLMNPLIDQYLYYLSRTNTPSGTTTMSRLQFSQAGASDIRDQSRNWLPGPCYRQQRVSKTAADNNNSDYSWTGATKYHLNGRDSLVNPGPAMASHKDDEEKYFPQSGVLIFGKQDSGKTNVDIEKVMITDEEEIRTTNPVATEQYGSVSTNLQSGNTQAATSDVNTQGVLPGMVWQDRDVYLQGPIWAKIPHTDGHFHPSPPMGGFGLKHPPPQILIKNTPVPANPSTTFSAAKFASFITQYSTGQVSVEIEWELQKENSKRWNPEIQYTSNYNKSVNVDFTVDTNGVYSEPRPIGARYLTRNL

SEQ ID NO: 221 - DNA, 2208 bp, Artificial Sequence
  source: /note="Description of Artificial Sequence: Synthetic polynucleotide"
atggctgccgatggttatcttccagattggctcgaggacaccctctctgaaggaataagacagtggtggaagctcaaacctggcccaccaccaccaaagcccgcagagcggcataaggacgacagcaggggtcttgtgcttcctgggtacaagtacctcggacccttcaacggactcgacaagggagagccggtcaacgaggcagacgccgcggccctcgagcacgacaaggcctacgaccggcagctcgacagcggagataacccgtacctcaagtacaaccacgccgacgcggagtttcaggagcgccttaaagaggatacgtcttttgggggcaacctcggacgagcagtcttccaggccaaaaagaggattcttgaacctctgggcctggttgaggaacctgttaagacggctccgggaaaaaagaggccggtagagcactctcctgcggagccagactcctcctcgggaaccggaaaagcgggccagcagcctgcaagaaagagattgaattttggtcagactggagacgcagactcagtacctgacccccggcctctcggacagccaccagcagccccctctggtctgggaactaatacgatggcttcaggcagtggcgcaccaatggcagacaataacgagggcgccgacggagtgggtaattcctcgggaaattggcattgcgattccacatggatgggcgacagagtcatcaccaccagcacccgcacctgggccctgcccacctacaacaaccatctgtacaagcaaatctccagccagtctggagccagcaacgacaaccactactttggctacagcaccccctgggggtattttgacttcaacagattccactgccacttctccccacgtgactggcaaagactcatcaacaacaactggggattccggcccaagagactcagcttcaagctctttaacattcaagtcaaagaggtcacgcagaatgacggtacgacgacgattgccaataaccttaccagcacggttcaggtgtttactgactcggagtaccagctcccgtacgtcctcggctcggcgcatcaaggatgcctcccgccgttcccagcagacgtcttcatggtgccacagtatggatacctcaccctgaacaacggcagtcaggcggtaggacgctcttccttttactgcctggagtactttccttctcagatgcttcgtaccggaaacaactttaccttcagctacacctttgaagacgttcctttccatagcagctacgctcacagccaaagtctggaccgtctcatgaatcctctcatcgaccagtacctgtattacttgagcagaacaaacactccaagcggaaccaccacgatgtccaggcttcagttttctcaggccggagcaagtgacattcgggaccagtctagaaactggcttcctggaccctgttaccgccagcagcgagtatcaaagacagctgcggacaacaacaacagtgattactcgtggactggagctaccaagtaccacctcaatggaagagactctctggtgaatccgggcccagctatggccagccacaaggacgatgaagaaaaatattttcctcagagcggggttctcatctttggaaaacaagactcgggaaaaactaatgtggacattgaaaaggttatgattacagacgaagaggaaatcaggaccaccaatcccgtggctacggagcagtatggttctgtatctaccaacctccagagcggcaacacacaagcagctacctcagatgtcaacacacaaggcgttcttccaggcatggtctggcaggacagagacgtgtacctgcaggggcccatctgggcaaagattccacacacggacggacattttcacccctctcccctcatgggcggattcggacttaaacaccctcctccacaaattctcatcaagaacaccccggtacctgcgaatccttcgaccactttcagtgcggcaaagtttgcttccttcatcacacagtactccacggggcaggtcagcgtggagatcgagtgggagctgcagaaggagaacagcaaacgctggaatcccgaaattcagtacacttccaactacaacaaatctgttaatgtggactttactgtggacactaatggtgtgtattcagagcctcgccccattggcaccagatacctgactcgtaatctgtaa

SEQ ID NO: 222 - protein, 735 aa, Artificial Sequence
  source: /note="Description of Artificial Sequence: Synthetic polypeptide"
MAADGYLPDWLEDTLSEGIRQWWKLKPGPPPPKPAERHKDDSRGLVLPGYKYLGPFNGLDKGEPVNEADAAALEHDKAYDRQLDSGDNPYLKYNHADAEFQERLKEDTSFGGNLGRAVFQAKKRILEPLGLVEEPVKTAPGKKRPVEHSPAEPDSSSGTGKAGQQPARKRLNFGQTGDADSVPDPRPLGQPPAAPSGLGTNTMASGSGAPMADNNEGADGVGNSSGNWHCDSTWMGDRVITTSTRTWALPTYNNHLYKQISSQSGASNDNHYFGYSTPWGYFDFNRFHCHFSPRDWQRLINNNWGFRPKRLSFKLFNIQVKEVTQNDGTTTIANNLTSTVQVFTDSEYQLPYVLGSAHQGCLPPFPADVFMVPQYGYLTLNNGSQAVGRSSFYCLEYFPSQMLRTGNNFTFSYTFEDVPFHSSYAHSQSLDRLMNPLIDQYLYYLSRTNTPSGTTTMSRLQFSQAGASDIRDQSRNWLPGPCYRQQRVSKTAADNNNSDYSWTGATKYHLNGRDSLVNPGPAMASHKDDEEKYFPQSGVLIFGKQDSGKTNVDIEKVMITDEEEIRTTNPVATEQYGSVSTNLQSGNTQAATSDVNTQGVLPGMVWQDRDVYLQGPIWAKIPHTDGHFHPSPLMGGFGLKHPPPQILIKNTPVPANPSTTFSAAKFASFITQYSTGQVSVEIEWELQKENSKRWNPEIQYTSNYNKSVNVDFTVDTNGVYSEPRPIGTRYLTRNL

SEQ ID NO: 223 - DNA, 2208 bp, Artificial Sequence
  source: /note="Description of Artificial Sequence: Synthetic polynucleotide"
atggctgccgatggttatcttccagattggctcgaggacactctctctgaaggaataagacagtggtggaagctcaaacctggcccaccaccaccaaagcccgcagagcggcataaggacgacagcaggggtcttgtgcttcctgggtacaagtacctcggacccttcaacggactcgacaagggagagccggtcaacgaggcagacgccgcggccctcgagcacgacaaggcctacgaccggcagctcgacagcggagacaacccgtacctcaagtacaaccacgccgacgcggagtttcaggagcgccttaaaggagatacgtcttttgggggcaacctcggacgagcagtcttccaggccaaaaagaggattcttgaacctctgggcctggttgaggaacctgttaagacggctccgggaaaaaagaggccggtagagcactctcctgcggagccagactcctcctcgggaaccggaaaagcgggccagcagcctgcaagaaagagattgaattttggtcagactggagacgcagactcagtacctgacccccagcctctcggacagccaccagcagccccctctggtctgggaactaatacgatggcttcaggcagtggcgcaccaatggcagacaataacgagggcgccgacggagtgggtaattcctcgggaaattggcattgcgattccacatggatgggcggcagagtcatcaccaccagcacccgcacctgggccctgcccacctacaacaaccatctgtacaagcaaatctccagccagtctggagccagcaacgacaaccactactttggctacagcaccccctgggggtattttgacttcaacagattccactgccacttctccccacgtgactggcaaagactcatcaacaacaactggggattccggcccaagagactcagcttcaagctctttaacattcaagtcaaagaggtcacgcagaatgacggtacgacgacgattgccaataaccttaccagcacggttcaggtgtttactgactcggagtaccagctcccgtacgtcctcggctcggcgcatcaaggatgcctcccgccgttcccagcagacgtcttcatggtgccacagtatggatacctcaccctgaacaacggcagtcaggcggtaggacgctcttccttttactgcctggagtactttccttctcagacgcttcgtaccggaaacaactttaccttcagctacacctttgaagacgttcctttccatagcagctacgctcacagccaaagtctggaccgtctcatgaatcctctcatcgaccagtacctgtattacttgagcagaacaaacactccaagcggaaccaccacgatgtccaggcttcagttttctcaggccggagcaagtgacattcgggaccagtctagaaactggcttcctggaccctgttaccgccagcagcgagtatcaaagacagctgcggacaacaacaacagtgattactcgtggactggagctaccaagtaccacctcaatggaagagactctctggtgaatccgggcccagctatggccagccacaaggacgatgaagaaaaatattttcctcagagcggggttctcatctttggaaaacaagactcgggaaaaactaatgtggacattgaaaaggttatgattacagacgaagaggaaatcaggaccaccaatcccgtggctacggagcagtatggttctgtatctaccaacctccagagcggcaacacacaagcagctacctcagatgtcaacacacaaggcgttcttccaggcatggtctggcaggacagagacgtgtacctgcaggggcccatctgggcaaagattccacacacggacggacattttcacccctctcccctcatgggcggattcggacttaaacaccctcctccacaaattctcatcaagaacaccccggtacctgcgaatccttcgaccactttcagtgcggcaaagtttgcttccttcatcacacagtactccacggggcaggtcagcgtggagatcgagtgggagctgcagaaggagaacagcaaacgctggaatcccgaaattcagtacacttccaactacaacaaatctgttaatgtggactttactgtggacactaatggtgtgtattcagagcctcgccccattggcaccagatacctgactcgtaatctgtaa

SEQ ID NO: 224 - protein, 735 aa, Artificial Sequence
  source: /note="Description of Artificial Sequence: Synthetic polypeptide"
MAADGYLPDWLEDTLSEGIRQWWKLKPGPPPPKPAERHKDDSRGLVLPGYKYLGPFNGLDKGEPVNEADAAALEHDKAYDRQLDSGDNPYLKYNHADAEFQERLKGDTSFGGNLGRAVFQAKKRILEPLGLVEEPVKTAPGKKRPVEHSPAEPDSSSGTGKAGQQPARKRLNFGQTGDADSVPDPQPLGQPPAAPSGLGTNTMASGSGAPMADNNEGADGVGNSSGNWHCDSTWMGGRVITTSTRTWALPTYNNHLYKQISSQSGASNDNHYFGYSTPWGYFDFNRFHCHFSPRDWQRLINNNWGFRPKRLSFKLFNIQVKEVTQNDGTTTIANNLTSTVQVFTDSEYQLPYVLGSAHQGCLPPFPADVFMVPQYGYLTLNNGSQAVGRSSFYCLEYFPSQTLRTGNNFTFSYTFEDVPFHSSYAHSQSLDRLMNPLIDQYLYYLSRTNTPSGTTTMSRLQFSQAGASDIRDQSRNWLPGPCYRQQRVSKTAADNNNSDYSWTGATKYHLNGRDSLVNPGPAMASHKDDEEKYFPQSGVLIFGKQDSGKTNVDIEKVMITDEEEIRTTNPVATEQYGSVSTNLQSGNTQAATSDVNTQGVLPGMVWQDRDVYLQGPIWAKIPHTDGHFHPSPLMGGFGLKHPPPQILIKNTPVPANPSTTFSAAKFASFITQYSTGQVSVEIEWELQKENSKRWNPEIQYTSNYNKSVNVDFTVDTNGVYSEPRPIGTRYLTRNL

SEQ ID NO: 225 - DNA, 2208 bp, Artificial Sequence
  source: /note="Description of Artificial Sequence: Synthetic polynucleotide"
atggctgccgatggttatcttccagattggctcgaggacactctctctgaaggaataagacagtggtggaagctcaaacctggcccaccaccaccaaagcccgcagagcggcataaggacgacagcaggggtcttgtgcttcctgggtacaagtacctcggacccttcaacggactcgacaagggagagccggtcaacgaggcagacgccgcggccctcgagcacgacaaggcctacgaccggcagctcgacagcggagacaacccgtacctcaagtacaaccacgccgacgcggagtttcaggagcgtcttaaagaagatacgtcttttgggggcaacctcggacgagcagtcttccaggccaaaaagaggattcttgaacctctgggcctggttgaggaacctgttaagacggctccgggaaaaaagaggccggtagagcactctcctgcggagccagactcctcctcgggaaccggaaaagcgggccagcagcctgcaagaaagagattgaattttggtcagactggagacgcagactcagtacctgacccccagcctctcggacagccaccagcagccccctctggtctgggaactaatacgatggcttcaggcagtggcgcaccaatggcagacaataacgagggcgccgacggagtgggtaattcctcgggaaattggcattgcgattccacatggatgggcgacagagtcatcaccaccagcacccgcacctgggccctgcccacctgcaacaaccatctgtacaagcaaatctccagccagtctggagccagcaacgacaaccactactttggctacagcaccccctgggggtattttgacttcaacagattccactgccacttctccccacgtgactggcaaagactcatcaacaacaactggggattccggcccaagagactcagcttcaagctctttaacattcaagtcaaagaggtcacgcagaatgacggtacgacgacgattgccaataaccttaccagcacggttcaggtgtttactgactcggagtaccagctcccgtacgtcctcggctcggcgcatcaaggatgcctcccgccgttcccagcagacgtcttcatggtgccacagtatggatacctcaccctgaacaacggcagtcaggcggtaggacgctcttccttttactgcctggagtattttccttctcagatgcttcgtaccggaaacaactttaccttcagctacacctttgaagacgttcctttccatagcagctacgctcacagccaaagtctggaccgtctcatgaatcctctcatcgaccagtacctgtattacttgagcagaacaaacactccaagcggaaccaccacgatgtccaggcttcagttttctcaggccggagcaagtgacattcgggaccagtctagaaactggcttcctggaccctgttaccgccagcagcgagtatcaaagacagctgcggacaacaacaacagtgattactcgtggactggagctaccaagtaccacctcaatggaagagactctctggtgaatccgggcccagctatggccagccacaaggacgatgaagaaaaatattttcctcagagcggggttctcatctttggaaaacaagactcgggaaaaactaatgtggacattgaaaaggttatgattacagacgaagaggaaatcaggaccaccaatcccgtggctacggagcagtatggttctgtatctacctacctccagagcggcaacacacaagcagctacctcagatgtcaacacacaaggcgttcttccaggcatggtctggcaggacagagacgtgtacctgcgggggcccatctgggcaaagattccacacacggacggacattttcacccctctcccctcatgggcggatttggacttaaacaccctcctccacaaattctcatcaagaacaccccggtacctgcgaatccttcgaccactttcagtgcggcaaagtttgcttccttcatcacacagtactccacggggcaggtcagcgtggagatcgagtgggagctgcagaaggagaacagcaaacgctggaatcccgaaattcagtacacttccaactacaacaaatctgttaatgtggactttactgtggacactaatggtgtgtattcagagcctcgccccattggcaccagatacctgactcgtaatctgtaa

SEQ ID NO: 226 - protein, 735 aa, Artificial Sequence
  source: /note="Description of Artificial Sequence: Synthetic polypeptide"
MAADGYLPDWLEDTLSEGIRQWWKLKPGPPPPKPAERHKDDSRGLVLPGYKYLGPFNGLDKGEPVNEADAAALEHDKAYDRQLDSGDNPYLKYNHADAEFQERLKEDTSFGGNLGRAVFQAKKRILEPLGLVEEPVKTAPGKKRPVEHSPAEPDSSSGTGKAGQQPARKRLNFGQTGDADSVPDPQPLGQPPAAPSGLGTNTMASGSGAPMADNNEGADGVGNSSGNWHCDSTWMGDRVITTSTRTWALPTCNNHLYKQISSQSGASNDNHYFGYSTPWGYFDFNRFHCHFSPRDWQRLINNNWGFRPKRLSFKLFNIQVKEVTQNDGTTTIANNLTSTVQVFTDSEYQLPYVLGSAHQGCLPPFPADVFMVPQYGYLTLNNGSQAVGRSSFYCLEYFPSQMLRTGNNFTFSYTFEDVPFHSSYAHSQSLDRLMNPLIDQYLYYLSRTNTPSGTTTMSRLQFSQAGASDIRDQSRNWLPGPCYRQQRVSKTAADNNNSDYSWTGATKYHLNGRDSLVNPGPAMASHKDDEEKYFPQSGVLIFGKQDSGKTNVDIEKVMITDEEEIRTTNPVATEQYGSVSTYLQSGNTQAATSDVNTQGVLPGMVWQDRDVYLRGPIWAKIPHTDGHFHPSPLMGGFGLKHPPPQILIKNTPVPANPSTTFSAAKFASFITQYSTGQVSVEIEWELQKENSKRWNPEIQYTSNYNKSVNVDFTVDTNGVYSEPRPIGTRYLTRNL

SEQ ID NO: 227 - DNA, 2208 bp, Artificial Sequence; identical to SEQ ID NO: 221
  source: /note="Description of Artificial Sequence: Synthetic polynucleotide"

SEQ ID NO: 228 - protein, 735 aa, Artificial Sequence; identical to SEQ ID NO: 222
  source: /note="Description of Artificial Sequence: Synthetic polypeptide"

SEQ ID NO: 229 - DNA, 2208 bp, Artificial Sequence
  source: /note="Description of Artificial Sequence: Synthetic polynucleotide"
atggctgccgatggttatcttccagattggctcgaggacactctctctgaaggaataagacagtggtggaagctcaaacctggcccaccaccaccaaagcccgcagagcggcataaggacggcagcaggggtcttgtgcttcctgggtacaagtacctcggacccttcaacggactcgacaagggagagccggtcaacgaggcagacgccgcggccctcgagcacgacaaggcctacgaccggcagctcaacagcggagacaacccgtacctcaagtacaaccacgccgacgcggagtttcaggagcgccttaaagaagatacgtcttttgggggcaacctcggacgagcagtcttccaggcaaaaaagagggttcttgaacctctgggcctggttgaggagcctgttaaaacggctccgggaaaaaagagaccggtagagcactctcctgcggagccagactcctcctcgggaaccggaaaagcgggccagcagcctgcaagaaagagattgaattttggtcagactggagacgcagactccgtacctgacccccagcctctcggacagccaccagcagccccctctggtctgggatctactacaatggctacaggcagtggcgcaccaatggcagacaataacgagggtgccgatggagtgggtaattcctcaggaaattggcattgcgattcccaatggctgggcgacagagtcatcaccacaagcactcgaacctgggccctgcccacctacaacaaccacctctacaagcaaatctccagccaatcaggagcctcaaacgacaaccactattttggctacagcaccccttgggggtattttgacttcaacagattccactgccacttttcaccacgtgactggcaaagactcatcaacaacaactggggattccgacccaagagactcaacttcaagctctttaacattcaagtcaaagaggtcacgcagaatgacggtacgacgacgattgccaataaccttaccagcacggttcaggtgtttactgactcggagtaccagctcccgtacgtcctcggctcggcgcatcaaggatgcctcccgccgttcccagcggacgtcttcatggtcccacagtatggatacctcaccctgaacaacgggagtcaggcggtaggacgctctcccttttactgcctggagtactttccttctcagatgctgcgtactggaaacaactttcagttcagctacacttttgaagacgtgcctttccacagcagctacgctcacagccagagtctggatcggctgatgaatcctctgatcgaccagtacctgtattatctgaacaagacacaaacaaatagtggaactcttcagcagtctcggctactgtttagccaagctggacccaccaacatgtctcttcaagctaaaaactggctgcctggaccttgctacagacagcagcgtctgtcaaagcaggcaaacgacaacaacaacagcaactttccctggactgcagctacaaagtatcatctaaatggccgggactcgttggttaatccaggaccagctatggccagtcacaaggatgacgaagaaaagtttttccccatgcatggaaccctgatatttggtaaacaaggaacaaatgccaacgacgcggatttggaaaatgtcatgattacagatgaagaagaaatcaggaccaccaatcccgtggctacggagcagtacgggactgtgtcaaataatttgcaaaactcaaacactggtccaactactggaactgtcaatcaccaaggagcgttacctggtatggtgtggcaggatcgagatgtgtaccttcagggacccatttgggccaagattcctcacaccgatggacactttcatccttctccactgatgggaggttttggactcaaacacccgcctcctcagattatgatcaaaaacactcccgttccagccaatcctcctacaaacttcagttctgccaagtttgcttctttcatcacacagtattccacggggcaggtcagcgtggagatcgagtgggagctgcagaaggagaacagcaaacgctggaatcccgaaattcagtacacttccaactacaacaaatctgttaatgtggactttactgtggacaataatggcgtgtactcagagcctcgccccattggcaccagatacctgactcgtaatctgtaa

SEQ ID NO: 230 - protein, 735 aa, Artificial Sequence
  source: /note="Description of Artificial Sequence: Synthetic polypeptide"
MAADGYLPDWLEDTLSEGIRQWWKLKPGPPPPKPAERHKDGSRGLVLPGYKYLGPFNGLDKGEPVNEADAAALEHDKAYDRQLNSGDNPYLKYNHADAEFQERLKEDTSFGGNLGRAVFQAKKRVLEPLGLVEEPVKTAPGKKRPVEHSPAEPDSSSGTGKAGQQPARKRLNFGQTGDADSVPDPQPLGQPPAAPSGLGSTTMATGSGAPMADNNEGADGVGNSSGNWHCDSQWLGDRVITTSTRTWALPTYNNHLYKQISSQSGASNDNHYFGYSTPWGYFDFNRFHCHFSPRDWQRLINNNWGFRPKRLNFKLFNIQVKEVTQNDGTTTIANNLTSTVQVFTDSEYQLPYVLGSAHQGCLPPFPADVFMVPQYGYLTLNNGSQAVGRSPFYCLEYFPSQMLRTGNNFQFSYTFEDVPFHSSYAHSQSLDRLMNPLIDQYLYYLNKTQTNSGTLQQSRLLFSQAGPTNMSLQAKNWLPGPCYRQQRLSKQANDNNNSNFPWTAATKYHLNGRDSLVNPGPAMASHKDDEEKFFPMHGTLIFGKQGTNANDADLENVMITDEEEIRTTNPVATEQYGTVSNNLQNSNTGPTTGTVNHQGALPGMVWQDRDVYLQGPIWAKIPHTDGHFHPSPLMGGFGLKHPPPQIMIKNTPVPANPPTNFSSAKFASFITQYSTGQVSVEIEWELQKENSKRWNPEIQYTSNYNKSVNVDFTVDNNGVYSEPRPIGTRYLTRNL

SEQ ID NO: 231 - DNA, 2208 bp, Artificial Sequence
  source: /note="Description of Artificial Sequence: Synthetic polynucleotide"
atggctgccgatggttatcttccagattggctcgaggacactctctctgaaggaataagacagtggtggaagctcaaacctggcccaccaccaccaaagcccgcagagcggcataaggacgacagcaggggtcttgtgcttcctgggtacaagtacctcggacccttcaacggactcgacaagggagagccggtcaacgaggcagacgccgcggccctcgagcacgacaaggcctacgaccggcagctcgacagcggagacaacccgtacctcaagtacaaccacgccgacgcggagtttcaggagcgtcttaaagaagatacgtcttttgggggcaacctcggacgagcagtcttccaggccaaaaagaggattcttgaacctctgggcctggttgaggaacctgttaagacggctccgggaaaaaagaggccggtagagcactctcctgcggagccagactcctcctcgggaaccggaaaagcgggccagcagcctgcaagaaagagattgaattttggtcagactggagacgcagactcagtacctgacccccagcctctcggacagccaccagcagccccctctggtctgggaactaatacgatggcttcaggcagtggcgcaccaatggcagacaataacgagggcgccgacggagtgggtaattcctcgggaaattggcattgcgattccacatggatgggcgacagagtcatcaccaccagcacccgcacctgggccctgcccacctacaacaaccatctgtacaagcaaatctccagccagtctggagccagcaacgacaaccactactttggctacagcaccccctgggggtattttgacttcaacagattccactgccacttctccccacgtgactggcaaagactcatcaacaacaactggggattccggcccaagagactcagcttcaagctctttaacattcaagtcaaagaggtcacgcagaatgacggtacgacgacgattgccaataaccttaccagcacggttcaggtgtttactgactcggagtaccagctcccgtacgtcctcggctcggcgcatcaaggatgcctcccgccgttcccagcagacgtcttcatggtgccacagtatggatacctcaccctgaacaacggcagtcaggcggtaggacgctcttccttttactgcctggagtactttccttctcagatgcttcgtaccggaaacaactttaccttcagctacacctttgaagacgttcctttccatagcagctacgctcacagccaaagtctggaccgtctcatgaatcctctcatcgaccagtacctgtattacttgagcagaacaaacactccaagcggaaccaccacgatgtccaggcttcagttttctcaggccggagcaagtgacattcgggaccagtctagaaactggcttcctggaccctgttaccgccagcagcgagtatcaaagacagctgcggacaacaacaacagtgattactcgtggactggagctaccaagtaccacctcaatggaagagactctctggtgaatccgggcccagctatggccagccacaaggacgatgaagaaaaatattttcctcagagcggggttctcatctttggaaaacaagactcgggaaaaactaatgtggacattgaaaaggttatgattacagacgaagaggaaatcaggaccaccaatcccgtggctacggagcagtatggttctgtatctaccaacctccagagcggcaacacacaagcagctacctcagatgtcaacacacaaggcgttcttccaggcatggtctggcaggacagagacgtgtacctgcaggggcccatctgggcaaagattccacacacggacggacattttcacccctctcccctcatgggcggattcggacttaaacaccctcctccacaaattctcatcaagaacaccccggtacctgcgaatccttcgaccactttcagtgcggcaaagtttgcttccttcatcacacagtactccacggggcaggtcagcgtggagatcgagtgggagctgcagaaggagaacagcaaacgctggaatcccgaaattcagtacacttccaactacaacaaatctgttaatgtggactttactgtggacactaatggtgtgtattcagagcctcgccccattggcaccagatacctgactcgtaatctgtaa

SEQ ID NO: 232 - protein, 735 aa, Artificial Sequence
  source: /note="Description of Artificial Sequence: Synthetic polypeptide"
MAADGYLPDWLEDTLSEGIRQWWKLKPGPPPPKPAERHKDDSRGLVLPGYKYLGPFNGLDKGEPVNEADAAALEHDKAYDRQLDSGDNPYLKYNHADAEFQERLKEDTSFGGNLGRAVFQAKKRILEPLGLVEEPVKTAPGKKRPVEHSPAEPDSSSGTGKAGQQPARKRLNFGQTGDADSVPDPQPLGQPPAAPSGLGTNTMASGSGAPMADNNEGADGVGNSSGNWHCDSTWMGDRVITTSTRTWALPTYNNHLYKQISSQSGASNDNHYFGYSTPWGYFDFNRFHCHFSPRDWQRLINNNWGFRPKRLSFKLFNIQVKEVTQNDGTTTIANNLTSTVQVFTDSEYQLPYVLGSAHQGCLPPFPADVFMVPQYGYLTLNNGSQAVGRSSFYCLEYFPSQMLRTGNNFTFSYTFEDVPFHSSYAHSQSLDRLMNPLIDQYLYYLSRTNTPSGTTTMSRLQFSQAGASDIRDQSRNWLPGPCYRQQRVSKTAADNNNSDYSWTGATKYHLNGRDSLVNPGPAMASHKDDEEKYFPQSGVLIFGKQDSGKTNVDIEKVMITDEEEIRTTNPVATEQYGSVSTNLQSGNTQAATSDVNTQGVLPGMVWQDRDVYLQGPIWAKIPHTDGHFHPSPLMGGFGLKHPPPQILIKNTPVPANPSTTFSAAKFASFITQYSTGQVSVEIEWELQKENSKRWNPEIQYTSNYNKSVNVDFTVDTNGVYSEPRPIGTRYLTRNL

SEQ ID NO: 233 - DNA, 2208 bp, Artificial Sequence
  source: /note="Description of Artificial Sequence: Synthetic polynucleotide"
atggctgccgatggttatcttccagattggctcgaggacactctctctgaaggaataagacagtggtggaagctcaaacctggcccaccaccaccaaagcccgcagagcggcataaggacgacagcaggggtcttgtgcttcctgggtacaagtacctcggacccttcaacggactcgacaagggagagccggtcaacgaggcagacgccgcggccctcgagcacgacaaggcctacgaccggcagctcgacagcggagacaacccgtacctcaagtacaaccacgccgacgcggagtttcaggagcgtcttaaagaagatacgtcttttgggggcaacctcggacgagcagtcttccaggccaaaaagaggattcttgaacctctgggcctggttgaggaacctgttaagacggctccgggaaaaaagaggccggtagagcactctcctgcggagccagactcctcctcgggaaccggaaaagcgggccagcagcctgcaagaaagagattgaattttggtcagactggagacgcagactcagtacctgacccccagcctctcggacagccaccagcagccccctctggtctgggaactaatacgatggcttcaggcagtggcgcaccaatggcagacaataacgagggcgccgacggagtgggtaattcctcgggaaattggcattgcgattccacatggatgggcgacagagtcatcaccaccagcacccgcacctgggccctgcccacctacaacaaccatctgtacaagcaaatctccagccagtctggagccagcaacgacaaccactactttggctacagcaccccctgggggtatttcgacttcaacagattccactgccacttctccccacgtgactggcaaagactcatcaacaacaactggggattccggcccaagagactcagcttcaagctctttaacattcaagtcaaagaggtcacgcagaatgacggtacgacgacgattgccaataaccttaccagcacggttcaggtgtttactgactcggggtaccagctcccgtacgtcctcggctcggcgcatcaaggatgccttccgccgttcccagcagacgtcttcatggtgccacagtatggatacctcaccctgaacaacggcagtcaggcggtaggacgctcttccttttactgcctggagtactttccttctcagatgcttcgtaccggaaacaactttaccttcagctacacctttgaagacgttcctttccatagcagctacgctcacggccaaagtctggaccgtctcatgaatcctctcatcgaccagtacctgtattacttgagcagaacaaacactccaagcggaaccaccacgatgtccaggcttcagttttctcaggccggagcaagtgacgttcgggaccagtctagaaactggcttcctggaccctgttaccgccagcagcgagtatcaaagacagctgcggacaacaacaacagtgattactcgtggactggagctaccaagtaccacctcaatggaagagactctctggtgaatccgggcccagctatggccagccacaaggacgatgaagaaaaatattttcctcagagcggggttctcgtctttggaaaacaagactcgggaaaaactaatgtggacattgaaaaggttatgattacagacgaagaggaaatcaggaccaccaatcccgcggctacggagcagtatggttctgtatctaccaacctccagagcggcaacacacaagcagctacctcagatgtcaacacacaaggcgttcttccaggcatggtctggcaggacagagacgtgtacctgcaggggcccatctgggcaaagattccacacacggacggacattttcacccctctcccctcatgggcggattcggacttaaacaccctcctccacaaattctcatcaagaacaccccggtacctgcgaatccttcgaccactttcagtgcggcaaagtttgtttccttcatcacacagtactccacggggcaggtcagcgtggagatcgagtgggagctgcagaaggagaacagcaaacgctggaatcccgaaattcagtacacttccaactacaacaaatctgttaatgtggactttactgtggacactaatggtgtgtattcagagcctcgccccattggcaccagatacctgactcgtaatctgtaa

SEQ ID NO: 234 - protein, 735 aa, Artificial Sequence
  source: /note="Description of Artificial Sequence: Synthetic polypeptide"
MAADGYLPDWLEDTLSEGIRQWWKLKPGPPPPKPAERHKDDSRGLVLPGYKYLGPFNGLDKGEPVNEADAAALEHDKAYDRQLDSGDNPYLKYNHADAEFQERLKEDTSFGGNLGRAVFQAKKRILEPLGLVEEPVKTAPGKKRPVEHSPAEPDSSSGTGKAGQQPARKRLNFGQTGDADSVPDPQPLGQPPAAPSGLGTNTMASGSGAPMADNNEGADGVGNSSGNWHCDSTWMGDRVITTSTRTWALPTYNNHLYKQISSQSGASNDNHYFGYSTPWGYFDFNRFHCHFSPRDWQRLINNNWGFRPKRLSFKLFNIQVKEVTQNDGTTTIANNLTSTVQVFTDSGYQLPYVLGSAHQGCLPPFPADVFMVPQYGYLTLNNGSQAVGRSSFYCLEYFPSQMLRTGNNFTFSYTFEDVPFHSSYAHGQSLDRLMNPLIDQYLYYLSRTNTPSGTTTMSRLQFSQAGASDVRDQSRNWLPGPCYRQQRVSKTAADNNNSDYSWTGATKYHLNGRDSLVNPGPAMASHKDDEEKYFPQSGVLVFGKQDSGKTNVDIEKVMITDEEEIRTTNPAATEQYGSVSTNLQSGNTQAATSDVNTQGVLPGMVWQDRDVYLQGPIWAKIPHTDGHFHPSPLMGGFGLKHPPPQILIKNTPVPANPSTTFSAAKFVSFITQYSTGQVSVEIEWELQKENSKRWNPEIQYTSNYNKSVNVDFTVDTNGVYSEPRPIGTRYLTRNL

SEQ ID NO: 235 - DNA, 2208 bp, Artificial Sequence
  source: /note="Description of Artificial Sequence: Synthetic polynucleotide"
atggctgccgatggttatcttccagattggctcgaggacactctctctgaaggaataagacagtggtggaaactcaaacctggcccaccaccaccaaagcccgcagagcggcataaggacgacagcaggggtcttgtgcttcctgggtacaagtacctcggacccttcaacggactcgacaagggagagccggtcaacgaggcagacgccgcggccctcgagcacgacaaggcctacgaccggcagctcgacagcggagacaacccgtacctcaagtacaaccacgccgacgcggagtttcaggagcgccttaaagaagatacgtcttttgggggcaacctcggacgagcagtcttccaggcaaaaaagagggttctggaacctctgagcctggttgaggagcctgttaagacggctccgggaaaaaagaggccggtagagcactctcccgcagagccagattcctcctccggaactggaaagtcgggcaaccagcctgcaagaaagagattgaatttcggtcagactggagactcagactccgtacctgacccccagcctctcggacagccaccagcagccccctctggtctgggaactaatacgatggctacaggcagtggcgcaccaatggcagacaataacgagggcgccgacggagtgggtaattcctcgggaaattggcattgcgattccacatggatgggcgacagagtcatcaccaccagcacccgaacctgggccctgcccacctacaacaaccatctgtacaagcaaatatccagccagtctggagccagcaacgacaatcactactttggctacagcaccccctgggggtattttgacttcaacagattccactgccacttttcaccacgtgactggcaaagactcatcaacaacaactggggattccgacccaagagactcaacttcaagctctttaacattcaagtcaaagaggtcacgcagaatgacggtacgacgacgattgccaataaccttaccagcacggttcaggtgtttactgactcggagtaccagctcccgtacgtcctcggctcggcgcatcaaggatgcctcccgccgttcccagcagacgtcttcatggtgccacagtatggatacctcaccctgaacaacgggagtcaggcagtaggacgctcttcattttactgcctagagtactttccttctcagatgctgcgtaccggaaacaactttaccttcagctacacctttgaggacgttcctttccacagcagctacgctcacagccagagtttggaccgtctcatgaatcctctcatcgaccagtacctgtattacttgagcagaacaaacactccaagcggaaccaccacgcagtccaggcttcagttttctcaggccggagcgagtgacattcaggaccagtctaggaactggcttcctggaccctgttaccgtcagcagcgagtatcaaagacatctgcggataacaacaacagtgaatactcgtggactggagctaccaagtaccacctcaatggcagagactctctggtgaatccgggcccggccatggccagccacaaagacgatgaagaaaagttttttcctcagagcggggttcttatctttgggaagcaaggctcagagaaaacaaatgtggatattgaaaaggtcatgattacagacgaagaggaaatcaggaccaccaatcccgtggctacggagcagtatggttctgtatctaccaacctccagagcggcaacacacaagcagctaccgcagatgtcaacacacaaggcgttcttccaggcatggtcgggcaagacagagacgtgtacctgcaggggcctacttgggcaaagattccacacacggacggacattttcacccctctcccctcatgggcggatttggacttaaacaccctcctccacagattctcatcaagaacaccccggtacctgcgaatccttcgaccaccttcagtgcggcaaagtttgcttccttcattacacagtactccacggggcaggtcagcgtggagatcgagtgggagctgcagaaggagaacagcaaacgctggaatcccgagatccagtacacttccaactacaacaagtctgttaatgtggactttactgtggacactaatggcgtgtattcagagcctcgccccattggcaccagatacctgactcgtaatctgtaa

SEQ ID NO: 236 - protein, 735 aa, Artificial Sequence
  source: /note="Description of Artificial Sequence: Synthetic polypeptide"
MAADGYLPDWLEDTLSEGIRQWWKLKPGPPPPKPAERHKDDSRGLVLPGYKYLGPFNGLDKGEPVNEADAAALEHDKAYDRQLDSGDNPYLKYNHADAEFQERLKEDTSFGGNLGRAVFQAKKRVLEPLSLVEEPVKTAPGKKRPVEHSPAEPDSSSGTGKSGNQPARKRLNFGQTGDSDSVPDPQPLGQPPAAPSGLGTNTMATGSGAPMADNNEGADGVGNSSGNWHCDSTWMGDRVITTSTRTWALPTYNNHLYKQISSQSGASNDNHYFGYSTPWGYFDFNRFHCHFSPRDWQRLINNNWGFRPKRLNFKLFNIQVKEVTQNDGTTTIANNLTSTVQVFTDSEYQLPYVLGSAHQGCLPPFPADVFMVPQYGYLTLNNGSQAVGRSSFYCLEYFPSQMLRTGNNFTFSYTFEDVPFHSSYAHSQSLDRLMNPLIDQYLYYLSRTNTPSGTTTQSRLQFSQAGASDIQDQSRNWLPGPCYRQQRVSKTSADNNNSEYSWTGATKYHLNGRDSLVNPGPAMASHKDDEEKFFPQSGVLIFGKQGSEKTNVDIEKVMITDEEEIRTTNPVATEQYGSVSTNLQSGNTQAATADVNTQGVLPGMVGQDRDVYLQGPTWAKIPHTDGHFHPSPLMGGFGLKHPPPQILIKNTPVPANPSTTFSAAKFASFITQYSTGQVSVEIEWELQKENSKRWNPEIQYTSNYNKSVNVDFTVDTNGVYSEPRPIGTRYLTRNL

SEQ ID NO: 237 - DNA, 2208 bp, Artificial Sequence
  source: /note="Description of Artificial Sequence: Synthetic polynucleotide"
atggctgccgatggttatcttccagattggctcgaggacactctctctgaaggaataagacagtggtggaagctcaaacctggcccaccaccaccaaagcccgcagagcggcataaggacgacagcaggggtcttgtgcttcctgggtacaagtacctcggacccttcaacggactcgacaagggagagccggtcaacgaggcagacgccgcggccctcgagcacgacaaggcctacgaccggcagctcgacagcggagacaacccgtacctcaagtacaaccacgccgacgcagagtttcaggagcgccttaaagaagatacgtcttttgggggcaacctcggacgagcagtcttccaggcaaaaaagagggttctggaacctctgggcctggttgaggagcctgttaagacggctccgggaaaaaagaggccggtagagcactctcctgcagagccagattcctcctccggaactggaaagtcgggcaaccagcctgcaagaaagagattgaatttcggtcagactggagactcagactccgtacctgacccccagcctctcggacagccaccagcagccccctctggtctgggaactaatacgatggctacaggcagtggcgcaccaatggcagacaataacgagggcgccgacggagtgggtaattcctcgggaaattggcattgcgattccacatggatgggcgacagagtcatcaccaccagcacccgaacctgggccctgcccacctacaacaaccatctgtacaagcaaatatccagccagtctggagccagcaacgacaatcactactttggctacagcaccccctgggggtattttgacttcaacagattccactgccacttttcaccacgtgactggcaaagactcatcaacaacaactggggattccgacccaagagactcaacttcaagctctttaacattcaagtcaaagaggtcacgcagaatgacggtacgacgacgattgccaataaccttaccagcacggttcaggtgtttactgactcggagtaccagctcccgtacgtcctcggctcggcgcatcaaggatgcctcccgccgttcccagcagacgtcttcatggtgccacagtatggatacctcaccctgaacaacgggagtcaggcagtaggacgctcttcattttactgcctagggtactttccttctcagatgctgcgtaccggaaacaactttaccttcagctacacctttgaggacgttcctttccacagcagctacgctcacagccagagtttggaccgtctcatgaatcctctcatcgaccagtacctgtattacttgagcagaacaaacactccaagcggaaccaccacgcagtccaggcttcagttttctcaggccggagcgagtgacattcgggaccagtctaggaactggcttcctggaccctgttaccgtcagcagcgagtatcaaagacatctgcggataacaacaacagtgaatactcgtggactggagctaccaagtaccacctcaatggcagagactctctggtgaatccgggcccggccatggccagccacaaagacgatgaagaaaagttttttcctcagagcggggttcttatctttgggaagcaaggcccagagaaaacaaatgtggatattgaaaaggtcatgattacagacgaagaggaaatcaggaccaccaatcccgtggctacggagcagtatggttctgtatctaccaacctccagagcggcaacacacaagcagctaccgcagatgtcaacacacaaggcgttcttccaggcatggtctggcaagacagagacgtgtacctgcaggggcctatttgggcaaagattccacacacggacggacattttcacccctctcccctcatgggcggatttggacttaaacaccctcctccacagattctcatcaagaacaccccggtacctgcgaatccttcgaccaccttcagtgcggcaaagtttgcttccttcattacacagtactccacggggcaggtcagcgtggagatcgagtgggagctgcagaaggagaacagcaaacgctggaatcccgagatccagtacacttccaactacaacaagtctgttaatgtggactttactgtggacactaatggcgtgtattcagagcctcgccccattggcaccagatacctgactcgtaatctgtaa

SEQ ID NO: 238 - protein, 735 aa, Artificial Sequence
  source: /note="Description of Artificial Sequence: Synthetic polypeptide"
MAADGYLPDWLEDTLSEGIRQWWKLKPGPPPPKPAERHKDDSRGLVLPGYKYLGPFNGLDKGEPVNEADAAALEHDKAYDRQLDSGDNPYLKYNHADAEFQERLKEDTSFGGNLGRAVFQAKKRVLEPLGLVEEPVKTAPGKKRPVEHSPAEPDSSSGTGKSGNQPARKRLNFGQTGDSDSVPDPQPLGQPPAAPSGLGTNTMATGSGAPMADNNEGADGVGNSSGNWHCDSTWMGDRVITTSTRTWALPTYNNHLYKQISSQSGASNDNHYFGYSTPWGYFDFNRFHCHFSPRDWQRLINNNWGFRPKRLNFKLFNIQVKEVTQNDGTTTIANNLTSTVQVFTDSEYQLPYVLGSAHQGCLPPFPADVFMVPQYGYLTLNNGSQAVGRSSFYCLGYFPSQMLRTGNNFTFSYTFEDVPFHSSYAHSQSLDRLMNPLIDQYLYYLSRTNTPSGTTTQSRLQFSQAGASDIRDQSRNWLPGPCYRQQRVSKTSADNNNSEYSWTGATKYHLNGRDSLVNPGPAMASHKDDEEKFFPQSGVLIFGKQGPEKTNVDIEKVMITDEEEIRTTNPVATEQYGSVSTNLQSGNTQAATADVNTQGVLPGMVWQDRDVYLQGPIWAKIPHTDGHFHPSPLMGGFGLKHPPPQILIKNTPVPANPSTTFSAAKFASFITQYSTGQVSVEIEWELQKENSKRWNPEIQYTSNYNKSVNVDFTVDTNGVYSEPRPIGTRYLTRNL

SEQ ID NO: 239 - protein, 735 aa, Artificial Sequence
  source: /note="Description of Artificial Sequence: Synthetic polypeptide"
MAADGYLPDWLEDTLSEGIRQWWKLKPGPPPPKPAERHKDDSRGLVLPGYKYLGPFNGLDKGEPVNEADAAALEHDKAYDRQLDSGDNPYLKYNHADAEFQERLKEDTSFGGNLGRAVFQAKKRVLEPLGLVEEPVKTAPGKKRPVEHSPAEPDSSSGTGKSGNQPARKRLNFGQTGDSDSVPDPQPLGQPPAAPSGLGTNTMATGSGAPMADNNEGADGVGNSSGNWHCDSTWMGDRVITTSTRTWALPTYNNHLYKQISSQSGASNDNHYFGYSTPWGYFDFNRFHCHFSPRDWQRLINNNWGFRPKRLNFKLFNIQVKEVTQNDGTTTIANNLTSTVQVFTDSEYQLPYVLGSAHQGCLPPFPADVFMVPQYGYLTLNNGSQAVGRSSFYCLEYFPSQMLRTGNNFTFSYTFEDVPFHSSYAHSQSLDRLMNPLIDQYLYYLSRTNTPSGTTTQSRLQFSQAGASDIRDQSRNWLPGPCYRQQRVSKTSADNNNSEYSWTGATKYHLNGRDSLVNPGPAMASHKDDEEKFFPQSGVLIFGKQGPEKTNVDIEKVMITDEEEIRTTNPVATEQYGSVSTNLQSGNTQAATADVNTQGVLPGMVWQDRDVYLQGPIWAKIPHTDGHFHPSPLMGGFGLKHPPPQILIKNTPVPANPSTTFSAAKFASFITQYSTGQVSVEIEWELQKENSKRWNPEIQYTSNYNKSVNVDFTVDTNGVYSEPRPIGTRYLTRNL

SEQ ID NO: 240 - protein, 735 aa, Artificial Sequence; identical to SEQ ID NO: 239
  source: /note="Description of Artificial Sequence: Synthetic polypeptide"

SEQ ID NO: 241 - DNA, 2211 bp, Artificial Sequence
  source: /note="Description of Artificial Sequence: Synthetic polynucleotide"
atggctgccgatggttatcttccagattggctcgaggacactctctctgaaggaataagacagtggtggaagctcaaacctggcccaccaccaccaaagcccgcagagcggcataaggacgacagcaggggtcttgtgcttcctgggtacaagtacctcggacccttcaacggactcgacaagggggagccggtcaacgaggcagacgccgcggccctcgagcacgacaaggcctacgaccggcagctcgacagcggagacaacccgtacctcaagtacaaccacgccgacgcagagtttcaggagcgccttaaagaagatacgtcttttgggggcaacctcggacgagcagtcttccaggcgaaaaagagggttcttgaacctctgcggcctggtttgaggaaacctgttaagacggctccgggaaaaaagaggccggtagagcactctcctgtggagccagactcctcctcgggaaccggaaaagcgggccagcagcctgcaagaaaaagattaaattttggtcagactggagacgcagactccgtacctgacccccagcctctcggacagccaccagcagccccctctggtctgggatctactacaatggctacaggcagtggcgcaccaatggcagacaataacgagggtgccgatggagtgggtaattcctcaggaaattggcattgcgattcccaatggctggacgacagagtcatcgccaccagcacccgaacctgggccctgcccacatacaacaaccacctctacaagcaaatctccagccaatcaggagcctgcaacgacaaccactactttggctacagcaccccctgggggtattttgacttcaacagattccactgccacttttcaccacgtgactggcaaagactcatcaacagcaactggggattccggcccaaaagactcaacttcaagctctttaatattcaagtcaaagaggtcacgcagaatgacggtacgacgacgattgccaataaccttaccagcacggttcaggtgtttactgactcggagtaccagctcccgtacgtcccgggctcggcgcatcaaggatgcctcccgccgtttccagcggacgtcttcatggtcccacagtatggatacctcaccctgaacaacgggagtcaggcggtaggacgctcttccttttactgcctggagtactttccttctcagatgctgcgtactggaaacaactttcagttcagctacacttttgaagacgtgcctttccacagcagctacgctcactgccagagtctggatcggctgatgaatcctctgatcgaccagtacctgtattatctgaacaagacacaaacaaatagtggaactcttcagcagtctcggctactgtttagccaagctggaccaaccaacatgtctcttcaagctaaaaactggctgcctggaccttgctacagacagcagcgtctgtcaaaacaggcaaacgacaataacaactgcaactttccctggactgcagctacaaagtatcatctaaatggccgggactcgttggttaatccaggaccagctatggccagtcacaaggatgacgaagaaaagtttttccccatgcatggaaccctgatatttggtaaacaaggaacaaatgccaacgacgcggatttggaaaatgtcatgattacagatgaagaagaaatcaggcccaccaatcccgtggctacggagcagtacgggactgtgtcaaataatttgcaaaactcaaacactggtccaactacaggaactgtcaatcaccaaggagcgttacctggtatggtgtggcaggatcgagacgtgtacctgcagggacccatttgggccaagattcctcacaccgatggacactttcatccttctccactgatgggaggttttggactcaaacacccgcctcctcagatcatgatcaaaagcactcccgttccagccaatcctcccacaaacttcagttctgccaagtttgcttcttccatcacacagtattccacgggacaggtcagcgtggagatcgagtgggagctgcagaaggagaacagcaaacgctggaatcccgaaattcagtacacttccaactacaacaagtctgttaatgtggactttactgtggacactaatggtgtgtattcagagcctcgccccattggcaccagatacctgactcgtaatctgtaa

SEQ ID NO: 242 - protein, 736 aa, Artificial Sequence
  source: /note="Description of Artificial Sequence: Synthetic polypeptide"
MAADGYLPDWLEDTLSEGIRQWWKLKPGPPPPKPAERHKDDSRGLVLPGYKYLGPFNGLDKGEPVNEADAAALEHDKAYDRQLDSGDNPYLKYNHADAEFQERLKEDTSFGGNLGRAVFQAKKRVLEPLRPGLRKPVKTAPGKKRPVEHSPVEPDSSSGTGKAGQQPARKRLNFGQTGDADSVPDPQPLGQPPAAPSGLGSTTMATGSGAPMADNNEGADGVGNSSGNWHCDSQWLDDRVIATSTRTWALPTYNNHLYKQISSQSGACNDNHYFGYSTPWGYFDFNRFHCHFSPRDWQRLINSNWGFRPKRLNFKLFNIQVKEVTQNDGTTTIANNLTSTVQVFTDSEYQLPYVPGSAHQGCLPPFPADVFMVPQYGYLTLNNGSQAVGRSSFYCLEYFPSQMLRTGNNFQFSYTFEDVPFHSSYAHCQSLDRLMNPLIDQYLYYLNKTQTNSGTLQQSRLLFSQAGPTNMSLQAKNWLPGPCYRQQRLSKQANDNNNCNFPWTAATKYHLNGRDSLVNPGPAMASHKDDEEKFFPMHGTLIFGKQGTNANDADLENVMITDEEEIRPTNPVATEQYGTVSNNLQNSNTGPTTGTVNHQGALPGMVWQDRDVYLQGPIWAKIPHTDGHFHPSPLMGGFGLKHPPPQIMIKSTPVPANPPTNFSSAKFASSITQYSTGQVSVEIEWELQKENSKRWNPEIQYTSNYNKSVNVDFTVDTNGVYSEPRPIGTRYLTRNL

SEQ ID NO: 243 - DNA, 2208 bp, Artificial Sequence
  source: /note="Description of Artificial Sequence: Synthetic polynucleotide"
atggctgccgatggttatcttccagattggctcgaggacactctctctgaaggaataagacagtggtggaagctcaaacctggcccaccaccaccaaagcccgcagagcggcataaggacgacagcaggggtcttgtgcttcctgggtacaagtacctcggacccttcaacggactcgacaagggagagccggtcaacgaggcagacgccgcggccctcgagcacgacaaggcctacgaccggcagctcgacagcggagacaacccgtacctcaagtacaaccacgccgacgcggagtttcaggagcgccttaaagaggatacgtcttttgggggcaacctcggacgagcagtcttccaggcaaaaaagagggttctggaacctctgggcctggttgaggagcctgttaagacggctccgggaaaaaagaggccggtagagcactctcctgcagagccagattcctcctccggaactggaaagtcgggcaaccagcctgcaagaaagagattgaatttcggtcagactggagactcagactccgtacctgacccccagcctctcggacagccaccagcagccccctctggtctgggaactaatacgatggctacaggcagtggcgcaccaatggcagacaataacgagggcgccgacggagtgggtaattcctcgggaaattggcattgcgattccacatggatgggcgacagagtcatcaccaccagcacccgaacctgggccctgcccacctacaacaaccatctgtacaagcaaatatccagccagtctggagccagcaacgacaatcactactttggctacagcaccccctgggggtattttgacttcaacagattccactgccacttttcaccacgtgactggcaaagactcatcaacaacaactggggattccgacccaagagactcaacttcaagctctttaacattcaagtcaaagaggtcacgcagaatgacggtacgacgacgattgccaataaccttaccagcacggttcaggtgtttactgactcggagtaccagctcccgtacgtcctcggctcggcgcatcaaggatgcctcccgccgttcccagcagacgtcttcatggtgccacagtatggatacctcaccctgaacaacgggagtcaggcagtaggacgctcttcattttactgcctagagtactttccttctcagatgctgcgtaccggaaacagctttaccttcagctacacctttgaggacgttcctttccacagcagctacgctcacagccagagtttggaccgtctcatgaatcctctcatcgaccagtacctgtattacttgagcagaacaaacactccaagcggaaccaccacgcagtccaggcttcagttttctcaggccggagcgagtgacattcgggaccagtctaggaactggcttcctggaccctgttaccgtcagcagcgagtatcaaagacatctgcggataacaacaacagtgaatactcgtggactggagctaccaagtaccacctcaatggcagagactctctggtgaatccgggcccggccatggccagccacaaagacgatgaagaaaagttctttcctcagagcggggttcttatctttgggaagcaaggctcagagaaaacaaatgtggatattgaaaaggtcatgattacagacgaagaggaaatcaggaccaccaatcccgtggctacggagcagtatggttctgtatctaccaacctccagagcggcaacacacaagcagctaccgcagatgtcaacacacaaggcgttcttccaggcatggtctggcaagacagagacgtgtacctgcaggggcctatttgggcaaagattccacacacggacggacattttcacccctctcccctcatgggcggatttggacttaaacaccctcctccacagattctcatcaagaacaccccggtacctgcgaatccttcgaccaccttcagtgcggcaaagtttgcttccttcattacacagtactccacggggcaggtcagcgtggagatcgagtgggagctgcagaaggagaacagcaaacgctggaatcccgagatccagtacacttccaactacaacaagtctgttaatgtggactttactgtggacactaatggcgtgtattcagagcctcgccccattggcaccagatacctgactcgtaatctgtaa

SEQ ID NO: 244 - protein, 735 aa, Artificial Sequence
  source: /note="Description of Artificial Sequence: Synthetic polypeptide"
MAADGYLPDWLEDTLSEGIRQWWKLKPGPPPPKPAERHKDDSRGLVLPGYKYLGPFNGLDKGEPVNEADAAALEHDKAYDRQLDSGDNPYLKYNHADAEFQERLKEDTSFGGNLGRAVFQAKKRVLEPLGLVEEPVKTAPGKKRPVEHSPAEPDSSSGTGKSGNQPARKRLNFGQTGDSDSVPDPQPLGQPPAAPSGLGTNTMATGSGAPMADNNEGADGVGNSSGNWHCDSTWMGDRVITTSTRTWALPTYNNHLYKQISSQSGASNDNHYFGYSTPWGYFDFNRFHCHFSPRDWQRLINNNWGFRPKRLNFKLFNIQVKEVTQNDGTTTIANNLTSTVQVFTDSEYQLPYVLGSAHQGCLPPFPADVFMVPQYGYLTLNNGSQAVGRSSFYCLEYFPSQMLRTGNSFTFSYTFEDVPFHSSYAHSQSLDRLMNPLIDQYLYYLSRTNTPSGTTTQSRLQFSQAGASDIRDQSRNWLPGPCYRQQRVSKTSADNNNSEYSWTGATKYHLNGRDSLVNPGPAMASHKDDEEKFFPQSGVLIFGKQGSEKTNVDIEKVMITDEEEIRTTNPVATEQYGSVSTNLQSGNTQAATADVNTQGVLPGMVWQDRDVYLQGPIWAKIPHTDGHFHPSPLMGGFGLKHPPPQILIKNTPVPANPSTTFSAAKFASFITQYSTGQVSVEIEWELQKENSKRWNPEIQYTSNYNKSVNVDFTVDTNGVYSEPRPIGTRYLTRNL

SEQ ID NO: 245 - DNA, 2211 bp, Artificial Sequence; identical to SEQ ID NO: 135
  source: /note="Description of Artificial Sequence: Synthetic polynucleotide"

SEQ ID NO: 246 - protein, 736 aa, Artificial Sequence
  source: /note="Description of Artificial Sequence: Synthetic polypeptide"
MAADGYLPDWLEDTLSEGIRQWWKLKPGPPPPKPAERHKDDSRGLVLPGYKYLGPGNGLDKGEPVNAADAAALEHDKAYDQQLKAGDNPYLKYNHADAEFQERLKEDTSFGGNLGRAVFQAKKRLLEPLGLVEEAAKTAPGKKRPVEQSPQEPDSSAGIGKSGSQPAKKKLNFGQTGDTESVPDPQPIGEPPAAPSGVGSLTMASGGGAPVADNNEGADGVGSSSGNWHCDSQWLGDRVITTSTRTWALPTYNNHLYKQISNSTSGGSSNDNAYFGYSTPWGYFDFNRFHCHFSPRDWQRLINNNWGFRPKRLNFKLFNIQVKEVTDNNGVKTIANNLTSTVQVFTDSDYQLPYVLGSAHEGCLPPFPADVFMIPQYGYLTLNDGGQAVGRSSFYCLEYFPSQMLRTGNNFQFSYEFENVPFHSSYAHSQSLDRLMNPLIDQYLYYLSKTINGSGQNQQTLKFSVAGPSNMAVQGRNYIPGPSYRQQRVSTTVTQNNNSEFAWPGASSWALNGRNSLMNPGPAMASHKEGEDRFFPLSGSLIFGKQGTGRDNVDADKVMITNEEEIKTTNPVATESYGQVATNHQSAQAQAQTGWVQNQGILPGMVWQDRDVYLQGPIWAKIPHTDGNFHPSPLMGGFGMKHPPPQILIKNTPVPADPPTAFNKDKLNSFITQYSTGQVSVEIEWELQKENSKRWNPEIQYTSNYYKSNNVEFAVSTEGVYSEPRPIGTRYLTRNL

SEQ ID NO: 247 - DNA, 2211 bp, Artificial Sequence
  source: /note="Description of Artificial Sequence: Synthetic polynucleotide"
atggctgccgatggttatcttccagattggctcgaggacactctctctgaaggaataagacagtggtggaagctcaaacctggcccaccaccaccaaagcccgcagagcggcataaggacgacagcaggggtcttgtgcttcctgggtacaagtacctcggacccggcaacggactcgacaagggggagccggtcaacgcagcagacgcggcggccctcgagcacgacaaggcctacgaccagcagctcaaggccggagacaacccgtacctcaagtacaaccacgccgacgccgagttccaggagcggctcaaagaagatacgtcttttgggggcaacctcgggcgagcagtcttccaggccaaaaagaggcttcttgaacctcttggtctggttgaggaagcggctaagacggctcctggaaagaagaggcctgtagagcagtctcctcaggaaccggactcctccgcgggtattggcaaatcgggttcacagcccgctaaaaagaaactcaatttcggtcagactggcgacacagagtcagtccccgaccctcaaccaatcggagaacctcccgcagccccctcaggtgtgggatctcttacaatggcttcaggtggtggcgcaccagtggcagacaataacgaaggtgccgatggagtgggtagttcctcgggaaattggcattgcgattcccaatggctgggggacagagtcatcaccaccagcacccgaacctgggccctgcccacctacaacaatcacctctacaagcaaatctccaacagcacatctggaggatcttcaaatgacaacgcctacttcggctacagcaccccctgggggtattttgacttcaacagattccactgccacttctcaccacgtgactggcagcgactcatcaacaacaactggggattccggcctaagcgactcaacttcaagctcttcaacattcaggtcaaagaggttacggacaacaatggagtcaagaccatcgccaataaccttaccagcacggtccaggtcttcacggactcagactatcagctcccgtacgtgctcgggtcggctcacgagggctgcctcccgccgttcccagcggacgttttcatgattcctcagtacgggtatctgacgcttaatgatgggagccaggccgtgggtcgttcgtccttttactgcctggaatatttcccgtcgcaaatgctaagaacgggtaacaacttccagttcagctacgagtttgagaacgtacctttccatagcagctacgctcacagccaaagcctggaccgactaatgaatccactcatcgaccaatacttgtactatctctcaaagactattaacggttctggacagaatcaacaaacgctaaaattcagcgtggccggacccagcaacatggctgtccagggaagaaactacatacctggacccagctaccgacaacaacgtgtctcaaccactgtgactcaaaacaacaacagcgaatttgcttggcctggagcttcttcttgggctctcaatggacgtaatagcttgatgaatcctggacctgctatggccagccacaaagaaggagaggaccgtttctttcctttgtctggatctttaatttttggcaaacaaggaactggaagagacaacgtggatgcggacaaagtcatgataaccaacgaagaagaaattaaaactactaacccggtagcaacggagtcctatggacaagtggccacaaaccaccagagtgcccaagcacaggcgcagaccggctgggttcaaaaccaaggaatacttccgggtatggtttggcaggacagagatgtgtacctgcaaggacccatttgggccaaaattcctcacacggacggcaactttcacccttctccgctaatgggagggtttggaatgaagcacccgcctcctcagatcctcatcaaaaacacacctgtacctgcggatcctccaacggctttcaataaggacaagctgaactctttcatcacccagtattctactggccaagtcagcgtggagattgagtgggagctgcagaaggaaaacagcaagcgctggaacccggagatccagtacacttccaactattacaagtctaataatgttgaatttgctgttaatactgaaggtgtatatagtgaaccccgccccattggcaccagatacctgactcgtaatctgtaa

SEQ ID NO: 248 - protein, 736 aa, Artificial Sequence
  source: /note="Description of Artificial Sequence: Synthetic polypeptide"
MAADGYLPDWLEDTLSEGIRQWWKLKPGPPPPKPAERHKDDSRGLVLPGYKYLGPGNGLDKGEPVNAADAAALEHDKAYDQQLKAGDNPYLKYNHADAEFQERLKEDTSFGGNLGRAVFQAKKRLLEPLGLVEEAAKTAPGKKRPVEQSPQEPDSSAGIGKSGSQPAKKKLNFGQTGDTESVPDPQPIGEPPAAPSGVGSLTMASGGGAPVADNNEGADGVGSSSGNWHCDSQWLGDRVITTSTRTWALPTYNNHLYKQISNSTSGGSSNDNAYFGYSTPWGYFDFNRFHCHFSPRDWQRLINNNWGFRPKRLNFKLFNIQVKEVTDNNGVKTIANNLTSTVQVFTDSDYQLPYVLGSAHEGCLPPFPADVFMIPQYGYLTLNDGSQAVGRSSFYCLEYFPSQMLRTGNNFQFSYEFENVPFHSSYAHSQSLDRLMNPLIDQYLYYLSKTINGSGQNQQTLKFSVAGPSNMAVQGRNYIPGPSYRQQRVSTTVTQNNNSEFAWPGASSWALNGRNSLMNPGPAMASHKEGEDRFFPLSGSLIFGKQGTGRDNVDADKVMITNEEEIKTTNPVATESYGQVATNHQSAQAQAQTGWVQNQGILPGMVWQDRDVYLQGPIWAKIPHTDGNFHPSPLMGGFGMKHPPPQILIKNTPVPADPPTAFNKDKLNSFITQYSTGQVSVEIEWELQKENSKRWNPEIQYTSNYYKSNNVEFAVNTEGVYSEPRPIGTRYLTRNL

SEQ ID NO: 249 - DNA, 2208 bp, Artificial Sequence
  source: /note="Description of Artificial Sequence: Synthetic polynucleotide"
atggctgccgatggttatcttccagattggctcgaggacactctctctgaaggaataagacagcggtggaagctcaaacctggcccaccaccaccagagcccgcagagcggcataaggacgacagcaggggtcttgtgcttcctgggtacaagtacctcggacccttcaacggactcgacaagggagagccggtcaacgaggcagacgccgcggccctcgagcacgacaaagcctacgaccggcagctcgacagcggagacaacccgtacctcaagtacaaccacgccgacgcggagtttcaggagcgccttaaagaagatacgtcttttgggggcaacctcggacgagcagtcttccaggcgaaaaagagggtacttgaacctctgggcctggttgaggaacctgttaagacggctccgggaaaaaagaggccggtagagcactctcctgtggagccagactcctcctcgggaaccggaaaggcgggccagcagcctgcaagaaaaagattgaattttggtcagactggagacgcagactcagtacctgacccccagcctctcggacagccaccagcagccccctctggtctgggaactaatacgatggctacaggcagtggcgcaccaatggcagacaataacgagggcgccgacggagtgggtaattcctcgggaaattggcattgcgattccacatggatgggcgacagagtcatcaccaccagcacccgaacctgggccctgcccacctacaacaaccacctctacaaacaaatttccagccaatcaggagcctcgaacgacaatcactactttggctacagcaccccttgggggtattttgacttcaacagattccactgccacttttcaccacgtgactggcaaagactcatcaacaacaactggggattccgacccaagagactcaacttcaagctctttaacattcaagtcaaagaggtcacgcagaatgacggtacgacgacgattgccaataaccttaccggcacggttcaggtgtttactgactcggagtaccagctcccgtacgtcctcggctcggcgcatcaaggatgcctcccgccgttcccagcagacgtcttcatggtgccacagtatggatacctcaccctgaacaacgggagtcaggcagtaggacgctcttcattttactgcctggagtactttccttctcagatgctgcgtaccggaaacaactttaccttcagctacacttttgaggacgttcctttccacagcagctacgctcacagccagagtctgggccgtctcatgaatcctctcatcgaccagtacctgtattacttgagcagaacaaacactccaagtggaaccaccacgcagtcaaggcttcagttttctcaggccggagcgagtgacattcgggaccagtctaggaactggcttcctggaccctgttaccgccagcagcgagtatcaaagacatctgcggataacaacaacagtgaatactcgtggactggagctaccaagtaccacctcaatggcagagactctctggtgaatccgggcccggccatggcaagccacaaggacgatgaagaaaagttttttcctcagagcggggttctcatctttgggaagcaaggctcagagaaaacaaatgtggacattgaaaaggtcatgattacagacgaagaggaaatcaggacaaccaatcccgtggctacggagcagtatggttctgtatctaccaacctccagagaggcaacagacaagcagctaccgcagatgtcaacacacaaggcgttcttccaggcatggtctggcaggacagagatgtgtaccttcaggggcccatctgggcaaagattccacacacggacggacattttcacccctctcccctcatgggtggattcggacttaaacaccctcctccacagattctcatcaagaacaccccggtacctgcgaatccttcgaccaccttcagtgcggcaaagtttgcttccttcatcacacagtactccacgggacaggtcagcgtggagatcgagtgggagctgcagaaggaaaacagcaaacgctggaatcccgaaattcagtacacttccaactacaacaagtctgttaatgtggactttactgtggacactaatggcgtgtattcagagcctcgccccattggcaccagatacctgactcgtaatctgtaa

SEQ ID NO: 250 - protein, 735 aa, Artificial Sequence
  source: /note="Description of Artificial Sequence: Synthetic polypeptide"
MAADGYLPDWLEDTLSEGIRQRWKLKPGPPPPEPAERHKDDSRGLVLPGYKYLGPFNGLDKGEPVNEADAAALEHDKAYDRQLDSGDNPYLKYNHADAEFQERLKEDTSFGGNLGRAVFQAKKRVLEPLGLVEEPVKTAPGKKRPVEHSPVEPDSSSGTGKAGQQPARKRLNFGQTGDADSVPDPQPLGQPPAAPSGLGTNTMATGSGAPMADNNEGADGVGNSSGNWHCDSTWMGDRVITTSTRTWALPTYNNHLYKQISSQSGASNDNHYFGYSTPWGYFDFNRFHCHFSPRDWQRLINNNWGFRPKRLNFKLFNIQVKEVTQNDGTTTIANNLTGTVQVFTDSEYQLPYVLGSAHQGCLPPFPADVFMVPQYGYLTLNNGSQAVGRSSFYCLEYFPSQMLRTGNNFTFSYTFEDVPFHSSYAHSQSLGRLMNPLIDQYLYYLSRTNTPSGTTTQSRLQFSQAGASDIRDQSRNWLPGPCYRQQRVSKTSADNNNSEYSWTGATKYHLNGRDSLVNPGPAMASHKDDEEKFFPQSGVLIFGKQGSEKTNVDIEKVMITDEEEIRTTNPVATEQYGSVSTNLQRGNRQAATADVNTQGVLPGMVWQDRDVYLQGPIWAKIPHTDGHFHPSPLMGGFGLKHPPPQILIKNTPVPANPSTTFSAAKFASFITQYSTGQVSVEIEWELQKENSKRWNPEIQYTSNYNKSVNVDFTVDTNGVYSEPRPIGTRYLTRNL

SEQ ID NO: 251 - DNA, 2208 bp, Artificial Sequence
  source: /note="Description of Artificial Sequence: Synthetic polynucleotide"
atggctgccgatggttatcttccagattggctcgaggacactctctctgaaggaataagacagcggtggaagctcaaacctggcccaccaccaccagagcccgcagagcggcataaggacgacagcaggggtcttgtgcttcctgggtacaagtacctcggacccttcaacggactcgacaagggagagccggtcaacgaggcagacgccgcggccctcgagcacgacaaagcctacgaccggcagctcgacagcggagacaacccgtacctcaagtacaaccacgccgacgcggagtttcaggagcgccttaaagaagatacgtcctttgggggcaacctcggacgagcagtcttccaggcgaaaaagagggtacttgaacctctgggcctggttgaggaacctgttaagacggctccgggaaaaaagaggccggtagagcactctcctgtggagccagactcctcctcgggaaccggaaaggcgggccagcagcctgcaagaaaaagattgaattttggtcagactggagacgcagactcagtacctgacccccagcctctcggacagccaccagcagccccctctggtctgggaactaatacgatggctacaggcagtggcgcaccaatggcagacaataacgagggcgccgacggagtgggtaattcctcgggaaattggcattgcgattccacatggatgggcgacagagtcatcaccaccagcacccgaacctgggccctgcccacctacaacaaccacctctacaaacaaatttccagccaatcaggagcctcgaacgacaatcactactttggctacagcaccccttgggggtattttgacttcaacagattccactgccacttttcaccacgtgactggcaaagactcatcaacaacaactggggattccgacccaagagactcaacttcaagctctttaacattcaagtcaaagaggtcacgcagaatgacggtacgacgacgattgccaataaccttaccagcacggttcaggtgtttactgactcggagtaccagctcccgtacgtcctcggctcggcgcatcaaggatgcctcccgccgttcccagcagacgtcttcatggtgccacagtatggatacctcaccctgaacaacgagagtcaggcagtaggacgctcttcattttactgcctggagtactttccttctcagatgctgcgtaccggaaacaactttaccttcagctacacttttgaggacgttcctttccacagcagctacgctcacagccagagtctgggccgtctcatgaatcctctcatcgaccagtacctgtattacttgagcagaacaaacactccaagtggaaccaccacgcagtcaaggcttcagttttctcaggccggagcgagtgacattcgggaccagtctaggaactggcttcctggaccctgttaccgccagcagcgagtatcaaagacatctgcggataacaacaacagtgaatactcgtggactggagctaccaagtaccacctcaatggcagagactctctggtgaatccgggcccggccatggcaagccacaaggacgatgaagaaaagttttttcctcagagcggggttctcatctttgggaagcaaggctcagagaaaacaaatgtggacattgaaaaggtcatgattacagacgaagaggaaatcaggacaaccaatcccgtggctacggagcagtatggttctgtatctaccaacctccagagaggcaacagacaagcagctaccgcagatgtcaacacacaaggcgttcttccaggcatggtctggcaggacagagatgtgtaccttcaggggcccatctgggcaaagattccacacacggacggacattttcacccctctcccctcatgggtggattcggacttaaacaccctcctccacagattctcatcaagaacaccccggtacctgcgaatccttcgaccaccttcagtgcggcaaagtttgcttccttcatcacacagtactccacgggacaggtcagcgtggagatcgagtgggagctgcagaaggaaaacagcaaacgctggaatcccgaaattcagtacacttccaactacaacaagtctgttaatgtggactttactgtggacactaatggcgtgtattcagagcctcgccccattggcaccagatacctgactcgtaatctgtaa

SEQ ID NO: 252 - protein, 735 aa, Artificial Sequence
  source: /note="Description of Artificial Sequence: Synthetic polypeptide"
MAADGYLPDWLEDTLSEGIRQRWKLKPGPPPPEPAERHKDDSRGLVLPGYKYLGPFNGLDKGEPVNEADAAALEHDKAYDRQLDSGDNPYLKYNHADAEFQERLKEDTSFGGNLGRAVFQAKKRVLEPLGLVEEPVKTAPGKKRPVEHSPVEPDSSSGTGKAGQQPARKRLNFGQTGDADSVPDPQPLGQPPAAPSGLGTNTMATGSGAPMADNNEGADGVGNSSGNWHCDSTWMGDRVITTSTRTWALPTYNNHLYKQISSQSGASNDNHYFGYSTPWGYFDFNRFHCHFSPRDWQRLINNNWGFRPKRLNFKLFNIQVKEVTQNDGTTTIANNLTSTVQVFTDSEYQLPYVLGSAHQGCLPPFPADVFMVPQYGYLTLNNESQAVGRSSFYCLEYFPSQMLRTGNNFTFSYTFEDVPFHSSYAHSQSLGRLMNPLIDQYLYYLSRTNTPSGTTTQSRLQFSQAGASDIRDQSRNWLPGPCYRQQRVSKTSADNNNSEYSWTGATKYHLNGRDSLVNPGPAMASHKDDEEKFFPQSGVLIFGKQGSEKTNVDIEKVMITDEEEIRTTNPVATEQYGSVSTNLQRGNRQAATADVNTQGVLPGMVWQDRDVYLQGPIWAKIPHTDGHFHPSPLMGGFGLKHPPPQILIKNTPVPANPSTTFSAAKFASFITQYSTGQVSVEIEWELQKENSKRWNPEIQYTSNYNKSVNVDFTVDTNGVYSEPRPIGTRYLTRNL

SEQ ID NO: 253 - DNA, 2208 bp, Artificial Sequence
  source: /note="Description of Artificial Sequence: Synthetic polynucleotide"
atggctgccgatggttatcttccagattggctcgaggacactctctctgaaggaataagacagcggtggaagctcaaacctggcccaccaccaccagagcccgcagagcggcataaggacgacagcaggggtcttgtgcttcctgggtacaagtacctcggacccttcaacggactcgacaagggagagccggtcaacgaggcagacgccgcggccctcgagcacgacaaagcctacgaccggcagctcgacagcggagacaacccgtacctcaagtacaaccacgccgacgcggagtttcaggagcgccttaaagaagatacgtcttttgggggcaacctcggacgagcagtcttccaggcgaaaaagagggtacttgaacctctgggcctggttgaggaacctgttaagacggctccgggaaaaaagaggccggtagagcactctcctgtggagccagactcctcctcgggaaccggaaaggcgggccagcagcctgcaagaaaaagattgaattttggtcagactggagacgcagactcagtacctgacccccagcctctcggacagccaccagcagccccctctggtctgggaactaatacgatggctacaggcagtggcgcaccaatggcagacaataacgagggcgccgacggagtgggtaattcctcgggaaattggcattgcgattccacatggatgggcgacagagtcatcaccaccagcacccgaacctgggccctgcccacctacaacaaccacctctacaaacaaatttccagccaatcaggagcctcgaacgacaatcactactttggctacagcaccccttgggggtattttgacttcaacagattccactgccacttttcaccacgtgactggcaaagactcatcaacaacaactggggattccgacccaagagactcaacttcaagctctttaacattcaagtcaaagaggtcacgcagaatgacggtacgacgacgattgccaataaccttaccagcacggttcaggtgtttactgactcggagtaccagctcccgtacgtcctcggctcggcgcatcaaggatgcctcccgccgttcccagcagacgtcttcatggtaccacagtatggatacctcaccctgaacaacgggagtcaggcagtaggacgctcttcattttactgcctggagtactttccttctcagatgctgcgtaccggaaacaactttaccttcagctacacttttgaggacgttcctttccacagcagctacgctcacagccagagtctgggccgtctcatgaatcctctcatcgaccagtacctgtattacttgagcagaacaaacactccaagtggaaccaccacgcagtcaaggcttcagttttctcaggccggagcgagtgacattcgggaccagtctaggaactggcttcctggaccctgttaccgccagcagcgagtatcaaagacatctgcggataacaacaacagtgaatactcgtggactggagctaccaagtaccacctcaatggcagagactctctggtgaatccgggcccggccatggcaagccacaaggacgatgaagaaaagttttttcctcagagcggggttctcatctttgggaagcaaggctcagagaaaacaaatgtggacattgaaaaggtcatgattacagacgaagaggaaatcaggacaaccaatcccgtggctacggagcagtatggttctgtatctaccaacctccagagaggcaacagacaagcagctaccgcagatgtcaacacacaaggcgttcttccaggcatggtctggcaggacagagatgtgtaccttcaggggcccatctgggcaaagattccacacacggacggacattttcacccctctcccctcatgggtggattcggacttaaacaccctcctccacagattctcatcaagaacaccccggtacctgcgaatccttcgaccaccttcagtgcggcaaagtttgcttccttcatcacacagtactccacgggacaggtcagcgtggagatcgagtgggagctgcagaaggaaaacagcaaacgctggaatcccgaaattcagtacacttccaactacaacaagtctgttaatgtggactttactgtggacactaatggcgtgtattcagagcctcgccccattggcaccagatacctgactcgtaatctgtaa

SEQ ID NO: 254 - protein, 735 aa, Artificial Sequence
  source: /note="Description of Artificial Sequence: Synthetic polypeptide"
MAADGYLPDWLEDTLSEGIRQRWKLKPGPPPPEPAERHKDDSRGLVLPGYKYLGPFNGLDKGEPVNEADAAALEHDKAYDRQLDSGDNPYLKYNHADAEFQERLKEDTSFGGNLGRAVFQAKKRVLEPLGLVEEPVKTAPGKKRPVEHSPVEPDSSSGTGKAGQQPARKRLNFGQTGDADSVPDPQPLGQPPAAPSGLGTNTMATGSGAPMADNNEGADGVGNSSGNWHCDSTWMGDRVITTSTRTWALPTYNNHLYKQISSQSGASNDNHYFGYSTPWGYFDFNRFHCHFSPRDWQRLINNNWGFRPKRLNFKLFNIQVKEVTQNDGTTTIANNLTSTVQVFTDSEYQLPYVLGSAHQGCLPPFPADVFMVPQYGYLTLNNGSQAVGRSSFYCLEYFPSQMLRTGNNFTFSYTFEDVPFHSSYAHSQSLGRLMNPLIDQYLYYLSRTNTPSGTTTQSRLQFSQAGASDIRDQSRNWLPGPCYRQQRVSKTSADNNNSEYSWTGATKYHLNGRDSLVNPGPAMASHKDDEEKFFPQSGVLIFGKQGSEKTNVDIEKVMITDEEEIRTTNPVATEQYGSVSTNLQRGNRQAATADVNTQGVLPGMVWQDRDVYLQGPIWAKIPHTDGHFHPSPLMGGFGLKHPPPQILIKNTPVPANPSTTFSAAKFASFITQYSTGQVSVEIEWELQKENSKRWNPEIQYTSNYNKSVNVDFTVDTNGVYSEPRPIGTRYLTRNL

SEQ ID NO: 255 - DNA, 2208 bp, Artificial Sequence
  source: /note="Description of Artificial Sequence: Synthetic polynucleotide"
atggctgccgatggttatcttccagattggctcgaggacactctctctgaaggaataagacagcggtggaagctcaaacctggcccaccaccaccagagcccgcagagcggcataaggacgacagcaggggtcttgtgcttcctgggtacaagtacctcggacccttcaacggactcgacaagggagagccggtcaacgaggcagacgccgcggccctcgagcacgacaaagcctacgaccggcagctcgacagcggagacaacccgtacctcaagtacaaccacgccgacgcggagtttcaggagcgccttaaagaagatacgtcttttgggggcaacctcggacgagcagtcttccaggcgaaaaagagggtactcgaacctctgggcctggttgaggaacctgttaagacggctccgggaaaaaagaggccggtagagcactctcctgtggagccagactcctcctcgggaaccggaaaggcgggccagcagcctgcaagaaaaagattgaattttggtcagactggagacgcagactcagtacctgacccccagcctctcggacagccaccagcagccccctctggtctgggaactaatacgatggctacaggcagtggcgcaccaatggcagacaataacgagggcgccgacggagtgggtaattcctcgggaaattggcattgcgattccacatggatgggcgacagagtcatcaccaccagcacccgaacctgggccctgcccacctacaacaaccacctctacaaacaaatttccagccaatcaggagcctcgaacgacaatcactactttggctacagcaccccttgggggtattttgacttcaacagattccactgccacttttcaccacgtgactggcaaagactcatcaacaacaactggggattccgacccaagagactcaacttcaagctctttaacattcaagtcaaagaggtcacgcagaatgacggtacgacgacgattgccaataaccttaccagcacggttcaggtgtttactgactcggagtaccagctcccgtacgtcctcggctcggcgcatcaaggatgcctcccgccgttcccagcagacgtcttcatggtgccacagtatggatacctcaccctgaacaacgggagtcaggcagcaggacgctcttcattttactgcctggagtactttccttctcagatgctgcgtaccggaaacaactttaccttcagctacacttttgaggacgttcctttccacagcagctacgctcacagccagagtctgggccgtctcatgaatcctctcatcgaccagtacctgtattacttgagcagaacaaacactccaagtggaaccaccacgcagtcaaggcttcagttttctcaggccggagcgagtgacattcgggaccagtctaggaactggcttcctggaccctgttaccgccagcagcgagtatcaaagacatctgcggataacaacaacagtgaatactcgtggactggagctaccaagtaccacctcaatggcagagactctctggtgaatccgggcccggccatggcaagccacaaggacgatgaagaaaagttttttcctcagagcggggttctcatctttgggaagcaaggctcagagaaaacaaatgtggacattgaaaaggtcatgattacagacgaagaggaaatcaggacaaccaatcccgtggctacggagcagtatggttctgtatctaccaacctccagagaggcaacagacaagcagctaccgcagatgtcaacacacaaggcgttcttccaggcatggtctggcaggacagagatgtgtaccttcaggggcccatctgggcaaagattccacacacggacggacattttcacccctctcccctcatgggtggattcggacttaaacaccctcctccacagattctcatcaagaacaccccggtacctgcgaatccttcgaccaccttcagtgcggcaaagtttgcttccttcatcacacagtactccacgggacaggtcagcgtggagatcgagtgggagctgcagaaggaaaacagcaaacgctggaatcccgaaattcagtacacttccaactacaacaagtccgttaatgtggactttactgtggacactaatggcgtgtattcagagcctcgccccattggcaccagatacctgactcgtaatctgtaa

SEQ ID NO: 256 - protein, 735 aa, Artificial Sequence
  source: /note="Description of Artificial Sequence: Synthetic polypeptide"
MAADGYLPDWLEDTLSEGIRQRWKLKPGPPPPEPAERHKDDSRGLVLPGYKYLGPFNGLDKGEPVNEADAAALEHDKAYDRQLDSGDNPYLKYNHADAEFQERLKEDTSFGGNLGRAVFQAKKRVLEPLGLVEEPVKTAPGKKRPVEHSPVEPDSSSGTGKAGQQPARKRLNFGQTGDADSVPDPQPLGQPPAAPSGLGTNTMATGSGAPMADNNEGADGVGNSSGNWHCDSTWMGDRVITTSTRTWALPTYNNHLYKQISSQSGASNDNHYFGYSTPWGYFDFNRFHCHFSPRDWQRLINNNWGFRPKRLNFKLFNIQVKEVTQNDGTTTIANNLTSTVQVFTDSEYQLPYVLGSAHQGCLPPFPADVFMVPQYGYLTLNNGSQAAGRSSFYCLEYFPSQMLRTGNNFTFSYTFEDVPFHSSYAHSQSLGRLMNPLIDQYLYYLSRTNTPSGTTTQSRLQFSQAGASDIRDQSRNWLPGPCYRQQRVSKTSADNNNSEYSWTGATKYHLNGRDSLVNPGPAMASHKDDEEKFFPQSGVLIFGKQGSEKTNVDIEKVMITDEEEIRTTNPVATEQYGSVSTNLQRGNRQAATADVNTQGVLPGMVWQDRDVYLQGPIWAKIPHTDGHFHPSPLMGGFGLKHPPPQILIKNTPVPANPSTTFSAAKFASFITQYSTGQVSVEIEWELQKENSKRWNPEIQYTSNYNKSVNVDFTVDTNGVYSEPRPIGTRYLTRNL

SEQ ID NO: 257 - protein, 738 aa, Artificial Sequence; identical to SEQ ID NO: 99
  source: /note="Description of Artificial Sequence: Synthetic polypeptide"

SEQ ID NO: 258 - DNA, 2217 bp, Artificial Sequence
  source: /note="Description of Artificial Sequence: Synthetic polynucleotide"
atggctgctgacggttatcttccagattggctcgaggacaacctctctgagggcattcgcgagtggtgggacctgaaacctggagcccccaagcccaaggccaaccagcagaagcaggacgacggccggggtctggtgcttcctggctacaagtacctcggacccttcaacggactcgacaagggggagcccgtcaacgcggcggacgcagcggccctcgagcacgacaaggcctacgaccagcagctcaaagcgggtgacaatccgtacctgcggtataaccacgccgacgccgagtttcaggagcgtctgcaagaagatacgtcttttgggggcaacctcgggcgagcagtcttccaggccaagaagcgggttctcgaacctctcggtctggttgaggaagctgctaagacggctcctggaaagaagagaccggtagaaccgtcacctcagcgttcccccgactcctccacgggcatcggcaagaaaggccagcagcccgctaaaaagagactgaactttggtcagactggcgactcagagtcagtccccgaccctcaaccaatcggagaaccaccagcaggcccctctggtctgggatctggtacaatggctgcaggcggtggcgctccaatggcagacaataacgaaggcgccgacggagtgggtagttcctcaggaaattggcattgcgattccacatggctgggcgacagagtcatcaccaccagcacccgaacctgggccctgcccacctacaacaaccacctctacaagcaaatatccaatgggacatcgggaggaagcaccaacgacaacacctacttcggctacagcaccccctgggggtattttgacttcaacagattccactgccacttctcaccacgtgactggcagcgactcatcaacaacaactggggattccggccaaaaagactcagcttcaagctcttcaacatccaggtcaaggaggtcacgcagaatgaaggcaccaagaccatcgccaataaccttaccagcacgattcaggtatttacggactcggaataccagctgccgtacgtcctcggctccgcgcaccagggctgcctgcctccgttcccggcggacgtcttcatgattccccagtacggctaccttacactgaacaatggaagtcaagccgtaggccgttcctccttctactgcctggaatattttccatctcaaatgctgcgaactggaaacaattttgaattcagctacaccttcgaggacgtgcctttccacagcagctacgcacacagccagagcttggaccgactgatgaatcctctcatcgaccagtacctgtactacttatccagaactcagtccacaggaggaactcaaggtacccagcaattgttattttctcaagctgggcctgcaaacatgtcggctcaggctaagaactggctacctggaccttgctaccggcagcagcgagtctctacgacactgtcgcaaaacaacaacagcaactttgcttggactggtgccaccaaatatcacctgaacggaagagactctttggtaaatcccggtgtcgccatggcaacccacaaggacgacgaggaacgcttcttcccgtcgagtggagtcctgatgttcggaaaacagggtgctggaagagacaatgtggactacagcagcgttatgctaaccagcgaagaagaaattaaaaccactaaccccgtagccacagaacaatacggtgtggtggctgacaacttgcagcaaaccaatacagggcctattgtgggaaatgtcaacagccaaggagccttacctggcatggtctggcagaaccgagacgtgtacctgcagggtcccatctgggccaagattcctcacacggacggcaacttccacccttcaccgctaatgggaggatttggactgaagcacccacctcctcagatcctgatcaagaacacgccggtacctgcggatcctccaacaacgttcagccaggcgaaattggcttccttcattacgcagtacagcaccggacaggtcagcgtggaaatcgagtgggagctgcagaaggagaacagcaaacgctggaacccagagattcagtacacttcaaactactacaaatctacaaatgtggactttgctgtcaatacagagggaacttattctgagcctcgccccattggtactcgttacctcacccgtaatctgtaa

SEQ ID NO: 259 - protein, 738 aa, Artificial Sequence
  source: /note="Description of Artificial Sequence: Synthetic polypeptide"
MAADGYLPDWLEDNLSEGIREWWDLKPGAPKPKANQQKQDDGRGLVLPGYKYLGPFNGLDKGEPVNAADAAALEHDKAYDQQLKAGDNPYLRYNHADAEFQERLQEDTSFGGNLGRAVFQAKKRVLEPLGLVEEAAKTAPGKKRPVEPSPQRSPDSSTGIGKKGQQPAKKRLNFGQTGDSESVPDPQPIGEPPAGPSGLGSGTMAAGGGAPMADNNEGADGVGSSSGNWHCDSTWLGDRVITTSTRTWALPTYNNHLYKQISNGTSGGSTNDNTYFGYSTPWGYFDFNRFHCHFSPRDWQRLINNNWGFRPKRLSFKLFNIQVKEVTQNEGTKTIANNLTSTIQVFTDSEYQLPYVLGSAHQGCLPPFPADVFMIPQYGYLTLNNGSQAVGRSSFYCLEYFPSQMLRTGNNFEFSYTFEDVPFHSSYAHSQSLDRLMNPLIDQYLYYLSRTQSTGGTQGTQQLLFSQAGPANMSAQAKNWLPGPCYRQQRVSTTLSQNNNSNFAWTGATKYHLNGRDSLVNPGVAMATHKDDEERFFPSSGVLMFGKQGAGRDNVDYSSVMLTSEEEIKTTNPVATEQYGVVADNLQQTNTGPIVGNVNSQGALPGMVWQNRDVYLQGPIWAKIPHTDGNCHPSPLMGGFGLKHPPPQILIKNTPVPADPPTTFSQAKLASFITQYSTGQVSVEIEWELQKENSKRWNPEIQYTSNYYKSTNVDFAVNTEGTYSEPRPIGTRYLTRNL

SEQ ID NO: 260 - protein, 738 aa, Artificial Sequence
  source: /note="Description of Artificial Sequence: Synthetic polypeptide"
MAADGYLPDWLEDNLSEGIREWWDLKPGAPKPKANQQKQDDGRGLVLPGYKYLGPFNGLDKGEPVNAADAAALEHDKAYDQQLKAGDNPYLRYNHADAEFQERLQEDTSFGGNLGRAVFQAKKRVLEPLGLVEEGAKTAPGKKRPVEPSPQRSPDSSTGIGKKGQQPARKRLNFGRTGDSESVPDPQPIGEPPAAPSSVGSGTMAAGGGAPMADNNEGADGVGSSSGNWHCDSTWLGDRVITTSTRTWALPTYNNHLYKQISNGTSGGSTNDNTYFGYSTPWGYLDFNRFHCHFSPRDWQRLINNNWGFRPKRLSFKLFNIQVKEVTQNEGTKTIANNLASTIQVFTDSEYQPPYVLGSAHQGCLPPFPADVFMIPQYGYLTLNNGSQAVGRSSFYCLEYFPSQMLRTGNNFSFSYTFEDVPFHSSYAHSQSLDRLMNPLIDQYLYYLSRTQSTGGTAGTQQLLFSRAGPSNMSAQARNWLPGPCYRQQRVSTTLSQNNNSNFAWTGATKYHLNGRDSLVNPGVAMATNKDDEDRFFPSSGILMFGKQGAGKDNVDYSNVMLTSEEEIKTTNPVATEQYGVVADNLQQQNTAPTVGAVNSQGALPGMVWQNRDVYLQGPIWAKIPHTDGNFHPSPLMGGFGLKHPPPQILIKNTPVPADPPTAFNQAKLNSFIAQYSTGQVSVEIEWELQKENSKRWNPEIQYTSNYYKSTNADFAVNTEGVYSEPRPIGTRYLTRNL

SEQ ID NO: 261 - DNA, 2217 bp, Artificial Sequence
  source: /note="Description of Artificial Sequence: Synthetic polynucleotide"
atggctgccgatggttatcttccagattggctcgaggacaacctctctgagggcattcgcgagtggtgggacctgaaacctggagccccgaaacccaaagccaaccagcaaaagcaggacgacggccggggtctggtgcttcctggctacaagtacctcggacccttcaacggactcgacaagggggagcccgtcaacgcggcggacgcagcggccctcgagcacgacaaggcctacgaccagcagctcaaagcgggtgacaatccgtacctgcggtataatcacgccgacgccgagtttcaggagcgtctgcaagaagatacgtcttttgggggcaacctcgggcgagcagtcttccaggccaagaagcgggttctcgaacctctcggtctggttgaggaaggcgctaagacggctcctggaaagaagagaccggtagagccgtcaccacagcgttcccccgactcctccacgggcatcggcaagaaaggccagcagcccgccagaaagagactcaatttcggtcggactggcgactcagagtcagtccccgaccctcaacctatcggagaacctccagcagcgccctctagtgtgggatctggtacaatggctgcaggcggtggcgcaccaatggcagacaataacgaaggtgccgacggagtgggtagttcctcgggaaattggcattgcgattccacatggctgggcgacagagttatcaccaccagcacccgaacctgggccctgcccacctacaacaaccacctctacaagcaaatctccaacgggacctcgggaggcagcaccaacgacaacacctactttggctacagcaccccctgggggtatcttgactttaacagattccactgccacttctcaccacgtgactggcagcgactcatcaacaacaactggggattccggcccaagagactcagcttcaagctcttcaacatccaggtcaaagaggtcacgcagaatgaaggcaccaagaccatcgccaataacctcgccagcaccatccaggtgtttacggactcggaataccagccgccgtacgtcctcggctctgcccaccagggctgcctgcctccgttcccggcggacgtcttcatgattcctcagtacggctacctgactctcaacaacggtagtcaggccgtgggacgttcctccttctactgcctggagtacttcccctctcagatgctgagaacgggcaacaacttttccttcagctacactttcgaggacgtgcctttccacagcagctacgcgcacagccagagtttggacaggctgatgaatcctctcatcgaccagtacctgtactacctgtcaagaacccagtctacgggaggcacagcgggaacccagcagttgctgttttctcgggccgggcctagcaacatgtcggctcaggccagaaactggctgcctggaccctgctacagacagcagcgcgtctccacgacactgtcgcaaaacaacaacagcaactttgcctggactggtgccaccaagtatcatctgaacggcagagactctctggtgaatccgggcgtcgccatggcaaccaacaaggacgacgaggaccgcttcttcccatccagcggcatcctcatgtttggcaagcagggagctggaaaagacaacgtggactatagcaacgtgatgctaaccagcgaggaagaaatcaagaccaccaaccccgtggccacagaacagtatggcgtggtggctgataacctacagcagcaaaacaccgctcctactgtgggggccgtcaacagccagggagccttacctggcatggtctggcagaaccgggacgtgtacctgcagggtcctatttgggccaagattcctcacacagatggcaactttcacccgtctcctttaatgggcggctttggacttaaacatccgcctcctcagatcctcatcaaaaacactcctgttcctgcggatcctccaacagcgttcaaccaggccaagctgaattctttcatcgcgcagtacagcaccggacaagtcagcgtggagatcgagtgggagctgcagaaggagaacagcaagcgctggaacccagagattcagtatacttccaactactacaaatctacaaatgcggactttgctgttaatactgagggtgtttactctgagcctcgccccattggcactcgttacctcacccgtaatctgtaa

SEQ ID NO: 262 - DNA, 2208 bp, Artificial Sequence
  source: /note="Description of Artificial Sequence: Synthetic polynucleotide"
atggctgccgatggttatcttccagattggctcgaggacactctctctgaaggaataagacagtggtggaagctcaaacctggcccaccaccaccaaagcccgcagagcggcataaggacgacagcaggggtcttgtgcttcctgggtacaagtacctcggacccttcaacggactcgacaagggggagccggtcaacgaggcagacgccgcggccctcgagcacgacaaggcctacgaccggcagctcgacagcggagacaacccgtacctcaagtacaaccacgccgacgcagagtttcaggagcgccttaaagaagatacgtcttttgggggcaacctcggacgagcagtcttccaggcgaaaaagagggttcttgaacctctgggcctggttgaggagcctgttaagacggctccgggaaaaaagaggccggtagagcactctcctgtggagccagactcctcctcgggaaccggaaaagcgggccagcagcctgcaagaaaaagattaaattttggtcagactggagacgcagactccgtacctgacccccagcctctcggacagccaccagcagccccctctggtctgggatctactacaatggctacaggcagtggcgcaccaatggcagacaataacgagggtgccgatggagtgggtaattcctcaggaaattggcattgcgattcccaatggctgggcgacagagtcatcaccaccagcacccgaacctgggccctgcccacatacaacaaccacctctacaagcaaatctccagccaatcaggagccagcaacgacaaccactactttggctacagcaccccctgggggtattttgacttcaacagattccactgccacttttcaccacgtgactggcaaagactcgtcaacaacaaccggggattccggcccaaaagactcaacttcaagctctttaatattcaagtcaaagaggtcacgcagaatgacggtacgacgacgattgccaataaccttaccagcacggttcaggtgtttactgactcggagtaccagctcccgtacgtcctgggctcggcgcatcaaggatgcctcccgccgtttccagcggacgtcttcatggtcccacagtatggatacctcaccctgaacaacgggagtcaggcggtaggacgctcttccttttactgcctggagtactttccttctcagatgctgcgtactggaaacaactttcagttcagctacacttttgaagacgtgcctttccacagcagctacgctcacagccagagtctggatcggctgatgaatcctctgatcgaccagtacctgtattatctgaacaagacacaaacaaatagtggaactcttcagcagtctcggctactgtttagccaagctggaccaaccaacatgtctcttcaagctaaaaactggctgcctggaccttgctacagacagcagcgtctgtcaaaacaggcaaacgacaacaacaacagcaactttccctggactgcagctacaaagtatcatctaaatggccgggactcgttggttaatccaggaccagctatggccagtcacaaggatgacgaagaaaagtttttccccatgcatggaaccctgatatttggtaaacaaggaacaaatgccaacgacgcggatttggaaaatgtcatgattacagatgaagaagaaatcagggccaccaatcccgtggctacggagcagtacgggactgtgtcaaataatttgcaaaactcaaacactggtccaactactggaactgtcaatcaccaaggagcgttacctggtatggtgtggcaggatcgagacgtgtacctgcagggacccatttgggccaagattcctcacaccgatggacactttcatccttctccactgatgggaggttttggactcaaacacccgcctcctcagatcatgatcaaaaacactcccgttccagccaatcctcccacaaacttcagttctgccaagtttgcttctttcatcacacagtattccacgggacaggtcagcgtggagatcgagtgggagctgcagaaggagaacagcaaacgctggaatcccgaaattcagtacacttccaactacaacaagtctgttaatgtggactttactgtggacactaatggtgtgtattcagagcctcgccccattggcaccagatacctgactcgtaatctgtaa

SEQ ID NO: 263 - protein, 735 aa, Artificial Sequence
  source: /note="Description of Artificial Sequence: Synthetic polypeptide"
MAADGYLPDWLEDTLSEGIRQWWKLKPGPPPPKPAERHKDDSRGLVLPGYKYLGPFNGLDKGEPVNEADAAALEHDKAYDRQLDSGDNPYLKYNHADAEFQERLKEDTSFGGNLGRAVFQAKKRVLEPLGLVEEPVKTAPGKKRPVEHSPVEPDSSSGTGKAGQQPARKRLNFGQTGDADSVPDPQPLGQPPAAPSGLGSTTMATGSGAPMADNNEGADGVGNSSGNWHCDSQWLGDRVITTSTRTWALPTYNNHLYKQISSQSGASNDNHYFGYSTPWGYFDFNRFHCHFSPRDWQRLVNNNRGFRPKRLNFKLFNIQVKEVTQNDGTTTIANNLTSTVQVFTDSEYQLPYVLGSAHQGCLPPFPADVFMVPQYGYLTLNNGSQAVGRSSFYCLEYFPSQMLRTGNNFQFSYTFEDVPFHSSYAHSQSLDRLMNPLIDQYLYYLNKTQTNSGTLQQSRLLFSQAGPTNMSLQAKNWLPGPCYRQQRLSKQANDNNNSNFPWTAATKYHLNGRDSLVNPGPAMASHKDDEEKFFPMHGTLIFGKQGTNANDADLENVMITDEEEIRATNPVATEQYGTVSNNLQNSNTGPTTGTVNHQGALPGMVWQDRDVYLQGPIWAKIPHTDGHFHPSPLMGGFGLKHPPPQIMIKNTPVPANPPTNFSSAKFASFITQYSTGQVSVEIEWELQKENSKRWNPEIQYTSNYNKSVNVDFTVDTNGVYSEPRPIGTRYLTRNL

SEQ ID NO: 264 - protein, 738 aa, Artificial Sequence
  source: /note="Description of Artificial Sequence: Synthetic polypeptide"
MAADGYLPDWLEDNLSEGIREWWDLKPGAPKPKANQQKQDDGRGLVLPGYKYLGPFNGLDKGEPVNAADAAALEHDKAYDQQLKAGDNPYLRYNHADAEFQERLQEDTSFGGNLGRAVFQAKKRVLEPLGLVEEAAKTAPGKKRPVEPSPQRSPDSSTGIGKKGQQPAKKRLSFGQTGDSESVPDPQPIGEPPAGPSGLGSGTMAAGGGAPMADNNEGADGVGSSSGNWHCDSTWLGDRVITTSTRTWALPTYNNHLYKQISNGTSGGSTNDNTYFGYSTPWGYFDFNRFHCHFSPRDWQRLINNNWGFRPKRLSFKLFNIQVKEVTQNEGTKTIANNLTSTIQVFTDSEYQLPYVLGSAHQGCLPPFPADVFMIPQYGYLTLNNGSQAVGRSSFYCLEYFPSQMLRTGNNSEFSYTFEDVPFHSSYAHSQSLDRLMNPLIDQYLYYLSRTQSTGGTQGTQQLLFSQAGPANMSAQAKNWLPGPCYRQQRVSTTLSQNNNSNFAWTGATKYHLNGRDSLVNPGVAMATHKDDEERFFPSSGVLMFGKQGAGRDNVDYSSVMLTSEEEIKTTNPVATEQYGVVADNLQQTNTGPIVGNVNSQGALPGMVWQNRDVYLQGPIWAKIPHTDGNFHPSPLMGGFGLKHPPPQILIKNTPVPADPPTTFSQAKLASFITQYSTGQVSVEIEWELQKENSKRWNPEIQYTSNYYKSTNVDFAVNTEGTYSEPRPIGTRYLTRNL

SEQ ID NO: 265 - DNA, 2217 bp, Artificial Sequence
  source: /note="Description of Artificial Sequence: Synthetic polynucleotide"
atggctgctgacggttatcttccagattggctcgaggacaacctctctgagggcattcgcgagtggtgggacctgaaacctggagcccccaagcccaaggccaaccagcagaagcaggacgacggccggggtctggtgcttcctggctacaagtacctcggacccttcaacggactcgacaagggggagcccgtcaacgcggcggacgcagcggccctcgagcacgacaaggcctacgaccagcagctcaaagcgggtgacaatccgtacctgcggtataaccacgccgacgccgagtttcaggagcgtctgcaagaagatacgtcttttgggggcaacctcgggcgagcagtcttccaggccaagaagcgggttctcgaacctctcggtctggttgaggaagctgctaagacggctcctggaaagaagagaccggtagaaccgtcacctcagcgttcccccgactcctccacgggcatcggcaagaaaggccagcagcccgctaaaaagagactgagctttggtcagactggcgactcagagtcagtccccgaccctcaaccaatcggagaaccaccagcaggcccctctggtctgggatctggtacaatggctgcaggcggtggcgctccaatggcagacaataacgaaggcgccgacggagtgggtagttcctcaggaaattggcattgcgattccacatggctgggcgacagagtcatcaccaccagcacccgaacctgggccctgcccacctacaacaaccacctctacaagcaaatatccaatgggacatcgggaggaagcaccaacgacaacacctacttcggctacagcaccccctgggggtattttgacttcaacagattccactgccacttctcaccacgtgactggcagcgactcatcaacaacaactggggattccggccaaaaagactcagcttcaagctcttcaacatccaggtcaaggaggtcacgcagaatgaaggcaccaagaccatcgccaataaccttaccagcacgattcaggtatttacggactcggaataccagctgccgtacgtcctcggctccgcgcaccagggctgcctgcctccgttcccggcggacgtcttcatgattccccagtacggctaccttacactgaacaatggaagtcaagccgtaggccgttcctccttctactgcctggaatattttccatctcaaatgctgcgaactggaaacaattctgaattcagctacaccttcgaggacgtgcctttccacagcagctacgcacacagccagagcttggaccgactgatgaatcctctcatcgaccagtacctgtactacttatccagaactcagtccacaggaggaactcaaggtacccagcaattgttattttctcaagctgggcctgcaaacatgtcggctcaggctaagaactggctacctggaccttgctaccggcagcagcgagtctctacgacactgtcgcaaaacaacaacagcaactttgcttggactggtgccaccaaatatcacctgaacggaagagactctttggtaaatcccggtgtcgccatggcaacccacaaggacgacgaggaacgcttcttcccgtcgagtggagtcctgatgtttggaaaacagggtgctggaagagacaatgtggactacagcagcgttatgctaaccagcgaagaagaaattaaaaccactaaccctgtagccacagaacaatacggtgtggtggctgacaacttgcagcaaaccaatacagggcctattgtgggaaatgtcaacagccaaggagccttacctggcatggtctggcagaaccgagacgtgtacctgcagggtcccatctgggccaagattcctcacacggacggcaacttccacccttcaccgctaatgggaggatttggactgaagcacccacctcctcagatcctgatcaagaacacgccggtacctgcggatcctccaacaacgttcagccaggcgaaattggcttccttcattacgcagtacagcaccggacaggtcagcgtggaaatcgagtgggagctgcagaaggagaacagcaaacgctggaacccagagattcagtacacttcaaactactacaaatctacaaatgtggactttgctgtcaatacagagggaacttattctgagcctcgccccattggtactcgttacctcacccgtaatctgtaa

SEQ ID NO: 266 - protein, 738 aa, Artificial Sequence
  source: /note="Description of Artificial Sequence: Synthetic polypeptide"
MAADGYLPDWLEDNLSEGIREWWDLKPGAPKPKANQQKQDDGRGLVLPGYKYLGPFNGLDKGEPVNAADAAALEHDKAYDQQLKAGDNPYLRYNHADAEFQERLQEDTSFGGNLGRAVFQAKKRVLEPLGPVEEAAKTAPGKKRPVEPPPQRSPDSSTGIGKKGQQPAKKRLNFGQTGDSESVPDPQPIGEPPAGPSGLGSGTMAAGGGAPMADNNEGADGVGSSSGNWHCDSTWLGDRVITTSTRTWALPTYNNHLYKQISNGTSGGSTNDNTYFGYSTPWGYFDFNRFHCHFSPRDWQRLINNNWGFRPKRLSFKLFNIQVKEVTQNEGTKTVANNLTSTIQVFTDSEYQLPYVLGSAHQGCLPPFPADVFMIPQYGYLTLNNGSQAVGRSSFYCLEYFPSQMLRTGNNFEFSYTFEDVPFHSSYAHSQSLDRLMNPLIDQYLYYLSRTQSTGGTQGTQQLLFSQAGPANMSAQAKNWLPGPCYRQQRVSTTLSQNNNSNFAWTGATKYHLNGRDSLVNPGVAMATHKDDEERFFPSSGVLMFGKQGAGRDNVDYSSVMLTSEEEIKTTNPVATEQYGVVADNLQQTNTGPIVGNVNSQGALPGMVWQNRDVYLQGPIWAKIPHTDGNFHPSPLMGGFGLKHPPPQILIKNTPVPADPPTTFSQAKLASFITQYSTGQVSVEIEWELQKENSKRWNPEIQYTSNYYKSTNVDFAVNTEGTYSEPRPIGTRYLTRNL

SEQ ID NO: 267 - DNA, 2217 bp, Artificial Sequence
  source: /note="Description of Artificial Sequence: Synthetic polynucleotide"
atggctgctgacggttatcttccagattggctcgaggacaacctctctgagggcattcgcgagtggtgggacctgaaacctggagcccccaagcccaaggccaaccagcagaagcaggacgacggccggggtctggtgcttcctggctacaagtacctcggacccttcaacggactcgacaagggggagcccgtcaacgcggcggacgcagcggccctcgagcacgacaaggcctacgaccagcagctcaaagcgggtgacaatccgtacctgcggtataaccacgccgacgccgagtttcaggagcgtctacaagaagatacgtcttttgggggcaacctcgggcgagcagtcttccaggccaagaagcgggttctcgaacctctcggtccggttgaggaagctgctaagacggctcctggaaagaagagaccggtagaaccgccacctcagcgttcccccgactcctccacgggcatcggcaagaaaggccagcagcccgctaaaaagagactgaactttggtcagactggcgactcagagtcagtccccgaccctcaaccaatcggagaaccaccagcaggcccctctggtctgggatctggtacaatggctgcaggcggtggcgctccaatggcagacaataacgaaggcgccgacggagtgggtagttcctcaggaaattggcattgcgattccacatggctgggcgacagagtcatcaccaccagcacccgaacctgggccctgcccacctacaacaaccacctctacaagcaaatatccaatgggacatcgggaggaagcaccaacgacaacacctacttcggctacagcaccccctgggggtattttgacttcaacagattccactgccacttctcaccacgtgactggcagcgactcatcaacaacaactggggattccggccaaaaagactcagcttcaagctcttcaacatccaggtcaaggaggtcacgcagaatgaaggcaccaagaccgtcgccaataaccttaccagcacgattcaggtatttacggactcggaataccagctgccgtacgtcctcggctccgcgcaccagggctgcctgcctccgttcccggcggacgtcttcatgattccccagtacggctaccttacactgaacaatggaagtcaagccgtaggccgttcctccttctactgcctggaatattttccatctcaaatgctgcgaactggaaacaattttgaattcagctacaccttcgaggacgtgcctttccacagcagctacgcacacagccagagcttggaccgactgatgaatcctctcatcgaccagtacctgtactacttatccagaactcagtccacaggaggaactcaaggtacccagcaattgttattttctcaagctgggcctgcaaacatgtcggctcaggctaagaactggctacctggaccttgctaccggcagcagcgagtctctacgacactgtcgcaaaacaacaacagcaactttgcttggactggtgccaccaaatatcacctgaacggaagagactctttggtaaatcccggtgtcgccatggcaacccacaaggacgacgaggaacgcttcttcccgtcgagtggagtcctgatgtttggaaaacagggtgctggaagagacaatgtggactacagcagcgttatgctaaccagcgaagaagaaattaaaaccactaaccctgtagccacagaacaatacggtgtggtggctgacaacttgcagcaaaccaatacagggcctattgtgggaaatgtcaacagccaaggagccttacctggcatggtctggcagaaccgagacgtgtacctgcagggtcccatctgggccaagattcctcacacggacggcaacttccacccttcaccgctaatgggaggatttggactgaagcacccacctcctcagatcctgatcaagaacacgccggtacctgcggatcctccaacaacgttcagccaggcgaaattggcttccttcattacgcagtacagcaccggacaggtcagcgtggaaatcgagtgggagctgcagaaggagaacagcaaacgttggaacccagagattcagtacacttcaaactactacaaatctacaaatgtggactttgctgtcaatacagagggaacttattctgagcctcgccccattggtactcgttacctcacccgtaatctgtaa

SEQ ID NO: 268 - protein, 738 aa, Artificial Sequence
  source: /note="Description of Artificial Sequence: Synthetic polypeptide"
MAADGYLPDWLEDNLSEGIREWWDLKPGAPKPKANQQKQDDGRGLVLPGYKYLGPFNGLDKGEPVNAADAAALEHDKAYDQQLKAGDNPYLRYNHADAEFQERLQEDTSFGGNLGRAVFQAKKRVLEPLGLVEEAAKTAPGKKRPVEPSPQRSPDSSTGIGKKGQQPAKKRLNFGQTGDSESVPDPQPIGEPPAGPSGLGSGTMAAGGGAPMADNNEGADGVGSSSGNWHCDSTWLGDRVITTSTRTWALPTYNNHLYKQISNGTSGGSTNDNTYFGYSTPWGYFDFNRFHCHFSPRDWQRLINNNWGFRPKRLSFKLFNIQVKEVTQNEGTKTIANNLTSTIQVFTDSEYQLPYVLGSAHQGCLPPFPADVFMIPQYGYLTLNNGSQAVGRSSFYCLEYFPSQMLRTGNNFEFSYTFEDVPFHSSYAHSQSLDRLMNPLIDQYLYYLSRTQSTGGTQGTQQLLFSQAGPANMSAQAKNWLPGPCYRQQRVSTTLSQSNNSNFAWTGATKYHLNGRDSLVNPGVAMATHKDDEERFFPSSGVLMFGKQGAGRDNVDYSSVMLTSEEEIKTTNPVATEQYGVVADNLQQTNTGPIVGNVNSQGALPGMVWQNRDVYLQGPIWAKIPHTDGNFHPSPLMGGLGLKHPPPQILIKNTPVPADPPTTFSQAKLASFITQYSTGQVSVEIEWELQKENSKRWNPEIQYTSNYYKSTNVDFAVNTEGTYSEPRPIGTRYLTRNL

SEQ ID NO: 269 - DNA, 2217 bp, Artificial Sequence
  source: /note="Description of Artificial Sequence: Synthetic polynucleotide"
atggctgctgacggttatcttccagattggctcgaggacaacctctctgagggcattcgcgagtggtgggacctgaaacctggagcccccaagcccaaggccaaccagcagaagcaggacgacggccggggtctggtgcttcctggctacaagtacctcggacccttcaacggactcgacaagggggagcccgtcaacgcggcggacgcagcggccctcgagcacgacaaggcctacgaccagcagctcaaagcgggtgacaatccgtacctgcggtataaccacgccgacgccgagtttcaggagcgtctgcaagaagatacgtcttttgggggcaacctcgggcgagcagtcttccaggccaagaagcgggttctcgaacctctcggtctggttgaggaagcggctaagacggctcctggaaagaagagaccggtagaaccgtcacctcagcgttcccccgactcctccacgggcatcggcaagaaaggccagcagcccgctaaaaagagactgaactttggtcagactggcgactcagagtcagtccccgaccctcaaccaatcggagaaccaccagcaggcccctctggtctgggatctggtacaatggctgcaggcggtggcgctccaatggcagacaataacgaaggcgccgacggagtgggtagttcctcaggaaattggcattgcgattccacatggctgggcgacagagtcatcaccaccagcacccgaacctgggccctgcccacctacaacaaccacctctacaagcaaatatccaatgggacatcgggaggaagcaccaacgacaacacctacttcggctacagcaccccctgggggtattttgacttcaacagattccactgccacttctcaccacgtgactggcagcgactcatcaacaacaactggggattccggccaaaaagactcagcttcaagctcttcaacatccaggtcaaggaggtcacgcagaatgaaggcaccaagaccatcgccaataaccttaccagcacgattcaggtatttacggactcggaataccagctgccgtacgtcctcggctccgcgcaccagggctgcctgcctccgttcccggcggacgtcttcatgattccccagtacggctaccttacactgaacaatggaagtcaagccgtaggccgttcctccttctactgcctggaatattttccatctcaaatgctgcgaactggaaacaattttgaattcagctacaccttcgaggacgtgcctttccacagcagctacgcacacagccagagcttggaccgactgatgaatcctctcatcgaccagtacctgtactacttatccagaactcagtccacaggaggaactcaaggtacccagcaattgttattttctcaagctgggcctgcaaacatgtcggctcaggctaagaactggctacctggaccttgctaccggcagcagcgagtctctacgacactgtcgcaaagcaacaacagcaactttgcttggactggtgccaccaaatatcacctgaacggaagagactctttggtaaatcccggtgtcgccatggcaacccacaaggacgacgaggaacgcttcttcccgtcgagtggagtcctgatgtttggaaaacagggtgctggaagagacaatgtggactacagcagcgttatgctaaccagcgaagaagaaattaaaaccactaaccctgtagccacagaacaatacggtgtggtggctgacaacttgcagcaaaccaatacagggcctattgtgggaaatgtcaacagccaaggagccttacctggcatggtctggcagaaccgagacgtgtacctgcagggtcccatctgggccaagattcctcacacggacggcaacttccacccttcaccgctaatgggaggacttggactgaagcacccacctcctcagatcctgatcaagaacacgccggtacctgcggatcctccaacaacgttcagccaggcgaaattggcttccttcattacgcagtacagcaccggacaggtcagcgtggaaatcgagtgggagctgcagaaggagaacagcaaacgctggaacccagagattcagtacacttcaaactactacaaatctacaaatgtggactttgctgtcaatacagagggaacttattctgagcctcgccccattggtactcgttacctcacccgtaatctgtaa

SEQ ID NO: 270 - protein, 737 aa, Artificial Sequence
  source: /note="Description of Artificial Sequence: Synthetic polypeptide"
MAADGYLPDWLEDNLSEGIREWWDLKPGAPKPKANQQKQDDGRGLVLPGYKYLGPFNGLDKGEPVNAADAAALEHDKAYDQQLKAGDNPYPRYNHADAEFQERLQEDTPFGGNLGRAVFQAKKRVLEPLGLVEEAAKTAPGKKRPVEPSPQRSPDSSTGIGKKGQQPAKKRLNFGQTGDSESVPDPQPIGEPPAGPSGLGSGTMAAGGGAPMADNNEGADGVGNASGNWHCDSTWLGDRVITTSTRTWALPTYNNHLYKQISSASTGASNDNHYFGYSTPWGYFDFNRFHCHFSPRDWQRLINNNWGFRPKRLNFKLFNIQVKEVTTNDGVTTIANNLTSTVQVFSDSEYQLPYVLGSAHQGCLPPFPADVFMIPQYGYLTLNNGSQAVGRSSFYCLEYFPSQMLRTGNNFTFSYTFEEVPLHSSYAHSQSLDRLMNPLIVQYLYYLNRTQNQSGSAQNKDLLFSRGSPAGMSVQPKNWLPGPCYRQQRVSKTKTDNNNSNFTWTGASKYNLNGRESIINPGTAMASHKDDEDKFFPMSGVMIFGKESAGASNTALDNVMITDEEEIKATNPVATERFGTVAVNFQSSSTDPATGDVHAMGALPGMVWQDRDVYLQGPIWAKIPHTDGHFHPSPLMGGFGLKNPPPQILIKNTPVPANPPAEFSATKFASFITQYSTGQVSVEIEWELQKENSKRWNPEVQYTSNYAKSASVDFTVDNNGLYTEPRPIGTRYLTRPL

SEQ ID NO: 271 - protein, 737 aa, Artificial Sequence
  source: /note="Description of Artificial Sequence: Synthetic polypeptide"
MAADGYLPDWLEDNLSEGIREWWDLKPGAPKPKANQQKQDDGRGLVLPGYKYLGPFNGLDKGEPVNAADAAALEHDKAYDQQLKAGDNPYPRYNHADAEFQERLQEDTSFGGNLGRAVFQAKKRVLEPLGLVEEAAKTAPGKKRPVEPSPQRSPDSSTGIGKKGQQPAKKRLNFGQTGDSESVPDPQPIGEPPAGPSGLGSGTMAAGGGAPMADNNEGADGVGNASGNWHCDSTWLGDRVITTSTRTWALPTYNNHLYKQISSASTGASNDNHYFGYSTPWGYFDFNRFHCHFSPRDWQRLINNNWGFRPKRLNFKLFNIQVKEVTTNDGVTTIANNLTSTVQVFSDSEYQLPYVLGSAHQGCLPPFPADVFMIPQYGYLTLNNGSQAVGRSSFYCLEYFPSQMLRTGNNFTFSYTFEEVPLHSSYAHSQSLDRLMNPLIDQYLYYLNRTQNQSGSAQNKDLLFSRGSPAGMSVQPKNWLPGPCYRQQRVSKTKTDNNNSNFTWTGASKYNLNGRESIINPGTAMASHKDDEDKFFPMSGVMIFGKESAGASNTALDNVMITDEEEIKATNPVATERFGTVAVNFQSSSTDPATGDVHAMGALPGMVWQDRDVYLQGPIWAKIPHTDGHFHPSPLMGGFGLKNPPPQILIKNTPVPANPPAEFSATKFASFITQYSTGQVSVEIEWELQKENSKRWNPEVQYTSNYAKSASVDFTVDNNGLYTEPRPIGTRYLTRPL

SEQ ID NO: 272 - DNA, 2214 bp, Artificial Sequence
  source: /note="Description of Artificial Sequence: Synthetic polynucleotide"
atggctgctgacggttatcttccagattggctcgaggacaacctctctgagggcattcgcgagtggtgggacctgaaacctggagcccccaagcccaaggccaaccagcagaagcaggacgacggccggggtctggtgcttcctggctacaagtacctcggacccttcaacggactcgacaagggggagcccgtcaacgcggcggacgcagcggccctcgagcacgacaaggcctacgaccagcagctcaaagcgggtgacaatccgtacccgcggtataaccacgccgacgccgagtttcaggagcgtctgcaagaagatacgccttttgggggcaacctcgggcgagcagtcttccaggccaagaagcgggttctcgaacctctcggtctggttgaggaagctgctaagacggctcctggaaagaagagaccggtagaaccgtcacctcagcgttcccccgactcctccacgggcatcggcaagaaaggccagcagcccgctaaaaagagactgaactttggtcagactggcgactcagagtcagtccccgaccctcaaccaatcggagaaccaccagcaggcccctctggtctgggatctggtacaatggctgcaggcggtggcgctccaatggcagacaataacgaaggcgccgacggagtgggtaatgcctcaggaaattggcattgcgattccacatggctgggcgacagagtcatcaccaccagcacccgcacctgggccttgcccacctacaataaccacctctacaagcaaatctccagtgcttcaacgggggccagcaacgacaaccactacttcggctacagcaccccctgggggtattttgatttcaacagattccactgccacttttcaccacgtgactggcagcgactcatcaacaacaattggggattccggcccaagagactcaacttcaaactcttcaacatccaagtcaaggaggtcacgacgaatgatggcgtcacaaccatcgctaataaccttaccagcacggttcaagtcttctcggactcggagtaccagcttccgtacgtcctcggctctgcgcaccagggctgcctccctccgttcccggcggacgtgttcatgattccgcaatacggctacctgacgctcaacaatggcagccaagccgtgggacgttcatccttttactgcctggaatatttcccttctcagatgctgagaacgggcaacaactttaccttcagctacacctttgaggaagtgcctctccacagcagctacgcgcacagccagagcctggaccggctgatgaatcctctcatcgtccaatacctgtattacctgaacagaactcaaaatcagtccggaagtgcccaaaacaaggacttgctgttcagccgtgggtctccagctggcatgtctgttcagcccaaaaactggctacctggaccctgttatcggcagcagcgcgtttctaaaacaaaaacagacaacaacaacagcaattttacctggactggtgcttcaaaatataacctcaatgggcgtgaatccatcatcaaccctggcactgctatggcctcacacaaagacgacgaagacaagttctttcccatgagcggtgtcatgatttttggaaaagagagcgccggagcttcaaacactgcattggacaatgtcatgattacagacgaagaggaaattaaagccactaaccctgtggccaccgaaagatttgggaccgtggcagtcaatttccagagcagcagcacagaccctgcgaccggagatgtgcatgctatgggagcattacctggcatggtgtggcaagatagagacgtgtacctgcagggtcccatttgggccaaaattcctcacacagatggacactttcacccgtctcctcttatgggcggctttggactcaagaacccgcctcctcagatcctcatcaaaaacacgcctgttcctgcgaatcctccggcggagttttcagctacaaagtttgcttcattcatcacccaatactccacaggacaagtgagtgtggaaattgaatgggagctgcagaaagaaaacagcaagcgctggaatcccgaagtgcagtacacatccaattatgcaaaatctgccagcgttgattttactgtggacaacaatggactttatactgagcctcgccccattggcacccgttaccttacccgtcccctgtaa

SEQ ID NO: 273 - protein, 736 aa, Artificial Sequence
  source: /note="Description of Artificial Sequence: Synthetic polypeptide"
MAADGYLPDWLEDTLSEGIRQWWKLRPGPPPPKPAERHKDDSRGLVLPGYKYLGPFNGLDKGEPVNEADAAALEHDKAYDRQLDSGDNPYLKYNHADAEFQERLKEDTSFGGNLGRAVFQAKKRVLEPLGLVEEGAETAPGKKRPVEQSPQGPDSSSGIGKTGQQPAKKRLNFGQTGDSESVPDPQPLGEPPATPAAVGPTTMASGGGAPMADNNEGADGVGNASGNWHCDSTWLGDRVITTSTRTWALPTYNNHLYKQISSASTGASNDNHYFGYSTPWGYFDFNRFHCHFSPRDWQRLINNNWGFRPKRLNFKLFNIQVKEVTTNDGVTTIANNLTSTVQVFSDSEYQLPYVLGSAHQGCLPPFPADVFMIPQYGYLTLNNGSQAVGRSSFYCLEYFPSQMLRTGNNFTFSYTFEEVPFHSSYAHSQSLDRLMNPLIDQYLYYPNRTQNQSGSAQNKDLLFSRGSPAGMSVQPKNWLPGPCYRQQRVSKTKTDNNNSNFTWTGASKYNLNGRESIINPGTAMASHKDDEDKFFPMSGVMIFGKESAGASNTALDNVMITDEEEIKATNPVATERFGTVAVNFQSSSTDPATGDVHAMGALPGMVWQGRDVYLQGPIWAKIPHTDGHFHPSPLMGGFGLKNPPPQILIKNTPVPANPPAEFSATKFASFITQYSTGQVSVEIEWELQKENSKRWNPEVQYTSNYAKSANVDFTVDNNGLYTEPRPIGTRYLTRPL

SEQ ID NO: 274 - DNA, 2211 bp, Artificial Sequence
  source: /note="Description of Artificial Sequence: Synthetic polynucleotide"
atggctgccgatggttatcttccagattggctcgaggacactctctctgaaggaataagacagtggtggaagctcagacctggcccaccaccaccaaagcccgcagagcggcataaggacgacagcaggggtcttgtgcttcctgggtacaagtacctcggacccttcaacggactcgacaagggagagccggtcaacgaggcagacgccgcggccctcgagcacgacaaagcctacgaccggcagctcgacagcggagacaacccgtacctcaagtacaaccacgccgacgcggagtttcaggagcgccttaaagaagatacgtcttttgggggcaacctcgggcgagcagtcttccaggccaagaagcgggttctcgaacctctcggtctggttgaggaaggcgctgagacggctcctggaaagaaacgtccggtagagcagtcgccacaagggccagactcctcctcgggcatcggcaagacaggccagcagcccgctaaaaagagactcaattttggtcagactggcgactcagagtcagtccccgatccacaacctctcggagaacctccagcaacccccgctgctgtgggacctactacaatggcttcaggcggtggcgcaccaatggcagacaataacgaaggcgccgacggagtgggtaatgcctcaggaaattggcattgcgattccacatggctgggcgacagagtcatcaccaccagcacccgcacctgggccttgcccacctacaataaccacctctacaagcaaatctccagtgcttcaacgggggccagcaacgacaaccactacttcggctacagcaccccctgggggtattttgatttcaacagattccactgccacttttcaccacgtgactggcagcgactcatcaacaacaattggggattccggcccaagagactcaacttcaaactcttcaacatccaagtcaaggaggtcacgacgaatgatggcgtcacaaccatcgctaataaccttaccagcacggttcaagtcttctcggactcggagtaccagcttccgtacgtcctcggctctgcgcaccagggctgcctccctccgttcccggcggacgtgttcatgattccgcaatacggctacctgacgctcaacaatggcagccaagccgtgggacgttcatccttttactgcctggaatatttcccttctcagatgctgagaacgggcaacaactttaccttcagctacacctttgaggaagtgcctttccacagcagctacgcgcacagccagagcctggaccggctgatgaatcctctcatcgaccaatacctgtattacccgaacagaactcaaaatcagtccggaagtgcccaaaacaaggacttgctgtttagccgtgggtctccagctggcatgtctgttcagcccaaaaactggctacctggaccctgttatcggcagcagcgcgtttctaaaacaaaaacagacaacaacaacagcaattttacctggactggtgcttcaaaatataacctcaatgggcgtgaatccatcatcaaccctggcactgctatggcctcacacaaagacgacgaagacaagttctttcccatgagcggtgtcatgatttttggaaaagagagcgccggagcttcaaacactgcattggacaatgtcatgattacagacgaagaggaaattaaagccactaaccctgtggccaccgaaagatttgggaccgtggcagtcaatttccagagcagcagcacagaccctgcgaccggagatgtgcatgctatgggagcattacctggcatggtgtggcaaggtagagacgtgtacctgcagggtcccatttgggccaaaattcctcacacagatggacactttcacccgtctcctcttatgggcggctttggactcaagaacccgcctcctcagatcctcatcaaaaacacgcctgttcctgcgaatcctccggcggagttttcagctacaaagtttgcttcattcatcacccaatactccacaggacaagtgagtgtggaaattgaatgggagctgcagaaagaaaacagcaagcgctggaatcccgaagtgcagtacacatccaattatgcaaaatctgccaacgttgattttactgtggacaacaatggactttatactgagcctcgccccattggcacccgttaccttacccgtcccctgtaa

SEQ ID NO: 275 - protein, 736 aa, Artificial Sequence
  source: /note="Description of Artificial Sequence: Synthetic polypeptide"
MAADGYLPDWLEDTLSEGIRQWWKLRPGPPPPKPAERHKDDSRGLVLPGYKYLGPFNGLDKGEPVNEADAAALEHDKAYDRQLDSGDNPYLKYNHADAEFQERLKEDTSFGGNLGRAVFQAKKRVLEPLGLVEEGAKTAPGKKRPVEQSPQGPDSSSGIGKTGQQPAKKRLNFGQTGDSESVPDPQPLGEPPATPAAVGPTTMASGGGAPMADNNEGADGVGNASGNWHCDSTWLGDRVITTSTRTWALPTYNNHLYKQISSASTGASNDNHYFGYSTPWGYFDFNRFHCHFSPRDWQRLINNNWGFRPKRLNFKLFNIQVKEVTTNDGVTTIANNLTSTVQVFSDSEYQLPYVLGSAHQGCLPPFPADVFMIPQYGYLTLNNGSQAVGRSSFYCLEYFPSQMLRTGNNFTFSYTFEEVPFHSSYAHSQSLDRLMNPLIDQYLYYPNRTQNQSGSAQNKDLLFSRGSPAGMSVQPKNWLPGPCYRQQRVSKTKTDNNNSNFTWTGASKYNLNGRESIINPGTAMASHKDDEDKFFPMSGVMIFGKESAGASNTALDNVMITDEEEIKATNPVATERFGTVAVNFQSSSTDPATGDVHAMGALPGMVWQGRDVYLQGPIWAKIPHTDGHFHPSPLMGGFGLKNPPPQILIKNTPVPANPPAEFSATKFASFITQYSTGQVSVEIEWELQKENSKRWNPEVQYTSNYAKSANVDFTVDNNGLYTEPRPIGTRYLTRPL

SEQ ID NO: 276 - protein, 736 aa, Artificial Sequence
  source: /note="Description of Artificial Sequence: Synthetic polypeptide"
MAADGYLPDWLEDTLSEGIRQWWKLRPGPPPPKPAERHKDDSRGLVLPGYKYLGPFNGLDKGEPVNEADAAALEHDKAYDRQLDSGDNPYLKYNHADAEFQERLKEDTSFGGNLGRAVFQAKKRVLEPLGLVEEGAKTAPGKKRPVEQSPQGPDSSSGIGKTGQQPAKKRLNFGQTGDSESVPDPQPLGEPPATPAAVGPTTMASGGGAPMADNNEGADGVGNASGNWHCDSTWLGDRVITTSTRTWALPTYNNHLYKQISSASTGASNDNHYFGYSTPWGYFDFNRFHCHFSPRDWQRLINNNWGFRPKRLNFKLFNIQVKEVTTNDGVTTIANNLTSTVQVFSDSEYQLPYVLGSAHQGCLPPFPADVFMIPQYGYLTLNNGSQAVGRSSFYCLEYFPSQMLRTGNNFTFSYTFEEVPFHSSYAHSQSLDRLMNPLIDQYLYYLNRTQNQSGSAQNKDLLFSRGSPAGMSVQPKNWLPGPCYRQQRVSKTKTDNNNSNFTWTGASKYNLNGRESIINPGTAMASHKDDEDKFFPMSGVMIFGKESAGASNTALDNVMITDEEEIKATNPVATERFGTVAVNFQSSSTDPATGDVHAMGALPGMVWQGRDVYLQGPIWAKIPHTDGHFHPSPLMGGFGLKNPPPQILIKNTPVPANPPAEFSATKFASFITQYSTGQVSVEIEWELQKENSKRWNPEVQYTSNYAKSANVDFTVDNNGLYTEPRPIGTRYLTRPL

SEQ ID NO: 277 - protein, 736 aa, Artificial Sequence
  source: /note="Description of Artificial Sequence: Synthetic polypeptide"
MAADGYLPDWLEDTLSEGIRQWWKLRPGPPPPKPAERHKDDSRGLVLPGYKYLGPFNGLDKGEPVNEADAAALEHDKAYDRQLDSGDNPYLKYNHADAEFQERLKEDTSFGGNLGRAVFQAKKRVLEPLGLVEEGAKTAPGKKRPVEQSPQGPDSSSGIGKTGQQPAKKRLNFGQTGDSESVPDPQPLGEPPATPAAVGPTTMASGGGAPMADNNEGADGVGNASGNWHCDSTWLGDRVITTSTRTWALPTYNNHLYKQISSASTGASNDNHYFGYSTPWGYFDFNRFHCHFSPRDWQRLINNNWGFRPKRLNFKLFNIQVKEVTTNDGVTTIANNLTSTVQVFSDSEYQLPYVLGSAHQGCLPPFPADVFMIPQYGYLTLNNGSQAVGRSSFYCLEYFPSQMLRTGNNFTFSYTFEEVPFHSSYAHSQSLDRLMNPLIDQYLYYLNRTQNQSGSAQNKDLLFSRGSPAGMSVQPKNWLPGPCYRQQRVSKTKTDNNNSNFTWTGASKYNLNGRESIINPGTAMASHKDDEDKFFPMSGVMIFGKESAGASNTALDNVMITDEEEIKATNPVATERFGTVAVNFQSSSTDPATGDVHAMGALPGMVWQDRDVYLQGPIWAKIPHTDGHFHPSPLMGGFGLKNPPPQILIKNTPVPANPPAEFSATKFASFITQYSTGQVSVEIEWELQKENSKRWNPEVQYTSNYAKSANVDFTVDNNGLYTEPRPIGTRYLTRPL

SEQ ID NO: 278 - DNA, 2208 bp, Artificial Sequence
  source: /note="Description of Artificial Sequence: Synthetic polynucleotide"
atggctgccgatggctatcttccagattggctcgaggacactctctctgaaggaataagacagtggtggaagctcaaacctggcccaccaccaccaaagcccgcagagcggcatagggacgacagcaggggtcttgtgcttcctgggtacaagtacctcggacccttcaacggactcgacaagggagagccggtcaacgaggcagacgccgcggccctcgagcacgacaaagcctacgaccggcagctcgacagcggagacaacccgtacctcaagtacaaccacgccgacgcggagtttcaggagcgccttaaagaagatacgtcttttgggggcaacctcggacgagcagtcttccaggcgaaaaagagggttcttgaacctctgggcctggttgaggaacctgttaagacggctccgggaaaaaagaggccggtagagcactctcctgtggagccagactcctcctcgggaaccggaaaggcgggccagcagcctgcaagaaaaagattgaattttggtcagactggagacgcagactcagtacctgacccccagcctctcggacagccaccagcagccccctctggtctgggaactaatacgatggctacaggcagtggcgcaccaatggcagacaataacgagggcgccgacggagtgggtaattcctcgggaaattggcattgcgattccacatggatgggcgacagagtcatcaccaccagcacccgaacctgggccctgcccacctacaacaaccacctctacaaacaaatttccagccaatcaggagcctcgaacgacaatcactactttggctacagcaccccttgggggtattttgacttcaacagattccactgccacttttcaccacgtgactggcaaagactcatcaacaacaactggggattccgacccaagagactcaacttcaagctctttaacattcaagtcaaagaggtcacgcagaatgacggtacgacgacgattgccaataaccttaccagcacggttcaggtgtttactgactcggggtaccagctcccgtacgtcctcggctcggcgcatcaaggatgcctcccgccgttcccagcagacgtcttcatggtgccacagtatggataccccaccctgaacaacgggagtcaggcagtaggacgctcttcattttactgcctggagtactttccttctcagatgctgcgtaccggaaacaactttaccttcagctacacttttgaggacgttcctttccacagcagctacgctcacagccagagtctggaccgtctcatgaatcctctcatcgaccagtacctgtattacttgagcacaacaaacactccaagtggaaccaccacgcagtcaaggcttcagttttctcaggccggagcgagtgacattcgggaccagtctaggaactggcttcctggaccctgttaccgccagcagcgagtatcaaagacatctgcggataacaacaacagtgaatactcgtggactggagctaccaagtaccacctcaatggcagagactctctggtgaatccgggcccggccgtggcaagccacaaggacgatgaagaaaagttttttcctcagagcggggttctcatctttgggaagcaaggctcagagaaaacaaatgtggacattgaaaaggtcatgattacagacgaagaggaaatcaggacaaccaatcccgtggctacggagcagtatggttctgtatctaccaacctccagagaggcaacagacaagcagctaccgcagatgtcaacacacaaggcgttcttccaggcatggtctggcaggacagagatgtgtaccttcaggggcccatctgggcaaagattccacacacggacggacattttcacccctctcccctcatgggtggattcggacttaaacaccctcctccacagattctcatcaagaacaccccggtacctgcgaatccttcgaccaccttcagtgcggcaaagtttgcttccttcatcacacagtactccacgggacaggtcagcgtggagatcgagtgggagctgcagaaggaaaacagcaaacgctggaatcccgaaattcagtacacttccaactacaacaagtctgttaatgtggactttactgtggacactaatggcgtgtattcagagcctcgccccattggcaccagatacctgactcgtaatctgtaa

SEQ ID NO: 279 - protein, 735 aa, Artificial Sequence
  source: /note="Description of Artificial Sequence: Synthetic polypeptide"
MAADGYLPDWLEDTLSEGIRQWWKLKPGPPPPKPAERHRDDSRGLVLPGYKYLGPFNGLDKGEPVNEADAAALEHDKAYDRQLDSGDNPYLKYNHADAEFQERLKEDTSFGGNLGRAVFQAKKRVLEPLGLVEEPVKTAPGKKRPVEHSPVEPDSSSGTGKAGQQPARKRLNFGQTGDADSVPDPQPLGQPPAAPSGLGTNTMATGSGAPMADNNEGADGVGNSSGNWHCDSTWMGDRVITTSTRTWALPTYNNHLYKQISSQSGASNDNHYFGYSTPWGYFDFNRFHCHFSPRDWQRLINNNWGFRPKRLNFKLFNIQVKEVTQNDGTTTIANNLTSTVQVFTDSGYQLPYVLGSAHQGCLPPFPADVFMVPQYGYPTLNNGSQAVGRSSFYCLEYFPSQMLRTGNNFTFSYTFEDVPFHSSYAHSQSLDRLMNPLIDQYLYYLSTTNTPSGTTTQSRLQFSQAGASDIRDQSRNWLPGPCYRQQRVSKTSADNNNSEYSWTGATKYHLNGRDSLVNPGPAVASHKDDEEKFFPQSGVLIFGKQGSEKTNVDIEKVMITDEEEIRTTNPVATEQYGSVSTNLQRGNRQAATADVNTQGVLPGMVWQDRDVYLQGPIWAKIPHTDGHFHPSPLMGGFGLKHPPPQILIKNTPVPANPSTTFSAAKFASFITQYSTGQVSVEIEWELQKENSKRWNPEIQYTSNYNKSVNVDFTVDTNGVYSEPRPIGTRYLTRNL

SEQ ID NO: 280 - DNA, 2211 bp, Artificial Sequence
  source: /note="Description of Artificial Sequence: Synthetic polynucleotide"
atggctgccgacggttatcttccagattggctcgaggacactctctctgaaggaataagacagtggtggaagctcaaacctggcccaccaccaccaaagcccgcagagcggcataaggacgacagcaggggtcttgtgcttcctgggtacaagtacctcggacccttcaacggactcgacaagggagagccggtcaacgaggcagacgccgcggccctcgagcacgacaaagcctacgaccggcagctcgacagcggagacaacccgtacctcaagtacaaccacgccgacgcggagtttcaggagcgccttaaagaagatacgtcttttgggggcaacctcgggcgggcagtcttccaggccaagaagcgggttctcgaacctctcggtctggttgaggaaggcgctaagacggctcctggaaagaaacgtccggtagagcagtcgccacaagagccagactccccctcgggcatcggcaagacaggccagcagcccgctaaaaagagactcaattttggtcagactggcgactcagagtcagtccccgatccacaacctctcggagaacctccagcaacccccgctgctgtgggacctactacaatggcttcaggcggtggcgcaccaatggcagacaataacgaaggcgccgacggagtgggtaatgcctcaggaaattggcactgcgattccacatggctgggcgacagagtcatcaccaccagcacccgcacctgggccttgcccacctacaataaccacctctacaagcaaatctccagtgcttcaacgggggccagcaacgacaaccactacttcggctacagcaccccctgggggtattttgatttcaacagattccactgccacttttcaccacgtgactggcagcgactcatcaacaacaattggggattccggcccaagagactcaacttcaaactcttcaacatccaagtcaaggaggtcacgacgaatgatggcgtcacaaccatcgctaataaccttaccagcacggttcaagtcttctcggactcggagtaccagcttccgtacgtcctcggctctgcgcaccagggccgcctccctccgttcccggcggacgtgttcatgattccgcaatacggctacctgacgctcaacaatggcagccaagccgtgggacgttcatcctcttactgcctggaatatttcccttctcagatgctgagaacgggcaacaactttaccttcagctacacctttgaggaagtgcctctccacagcagctgcgcgcacagccagagcctggaccggctgatgaatcctctcatcgaccaatacctgtattacctgaacagaactcaaaatcagtccggaagtgcccaaaacagggacttgctgttcagccgtgggtctccagctggcatgtctgttcagcccaaaaactggctacctggaccctgttatcggcagcagcgcgtttctaaaacaaaaacagacaacaacaacagcaattttacctggactggtgcttcaaaatataacctcaatgggcgtgaatccatcatcaaccctggcactgctatggcctcacacaaagacgacgaagacaagttctttcccatgagcggtgtcatgatttttggaaaagagagcgccggagcttcaaacactgcattggacaatgtcatgattacagacgaagaggaaattaaagccactaaccctgtggccaccgaaagatttgggaccgtggcagtcaatttccagagcagcagcacagaccctgcgaccggagatgtgcatgctatgggagcattacctggcatggtgtggcaagatagagacgtgtacctgcagggtcccatttgggccaaaattcctcacacagatggacactttcacccgtctcctcttatgggcggctttggactcaagaacccgcctcctcagatcctcatcaaaaacacgcctgttcctgcgaatcctccggcggagttttcagctacaaagtttgcttcattcatcacccaatactccgcaggacaagtgagtgtggaaattgaatgggagctgcagaaagaaaacagcaagcgctggaatcccgaagtgcagtacacatccaattatgcaaaatctgccaacgttgattttactgtggacaacaatggactttatactgagcctcgccccattggcacccgttaccttacccgtcccctgtaa

SEQ ID NO: 281 - protein, 736 aa, Artificial Sequence
  source: /note="Description of Artificial Sequence: Synthetic polypeptide"
MAADGYLPDWLEDTLSEGIRQWWKLKPGPPPPKPAERHKDDSRGLVLPGYKYLGPFNGLDKGEPVNEADAAALEHDKAYDRQLDSGDNPYLKYNHADAEFQERLKEDTSFGGNLGRAVFQAKKRVLEPLGLVEEGAKTAPGKKRPVEQSPQEPDSPSGIGKTGQQPAKKRLNFGQTGDSESVPDPQPLGEPPATPAAVGPTTMASGGGAPMADNNEGADGVGNASGNWHCDSTWLGDRVITTSTRTWALPTYNNHLYKQISSASTGASNDNHYFGYSTPWGYFDFNRFHCHFSPRDWQRLINNNWGFRPKRLNFKLFNIQVKEVTTNDGVTTIANNLTSTVQVFSDSEYQLPYVLGSAHQGRLPPFPADVFMIPQYGYLTLNNGSQAVGRSSSYCLEYFPSQMLRTGNNFTFSYTFEEVPLHSSCAHSQSLDRLMNPLIDQYLYYLNRTQNQSGSAQNRDLLFSRGSPAGMSVQPKNWLPGPCYRQQRVSKTKTDNNNSNFTWTGASKYNLNGRESIINPGTAMASHKDDEDKFFPMSGVMIFGKESAGASNTALDNVMITDEEEIKATNPVATERFGTVAVNFQSSSTDPATGDVHAMGALPGMVWQDRDVYLQGPIWAKIPHTDGHFHPSPLMGGFGLKNPPPQILIKNTPVPANPPAEFSATKFASFITQYSAGQVSVEIEWELQKENSKRWNPEVQYTSNYAKSANVDFTVDNNGLYTEPRPIGTRYLTRPL

SEQ ID NO: 282 - protein, 736 aa, Artificial Sequence
  source: /note="Description of Artificial Sequence: Synthetic polypeptide"
MAADGYLPDWLEDTLSEGIRQWWKLKPGPPPPKPAERHKDDSRGLVLPGYKYLGPFNGLDKGEPVNEADAAALEHDKAYDRQLDSGDNPYLKYNHADAEFQERLKEDTSFGGNLGRAVFQAKKRVLEPLGLVEEGAKTAPGKKRPVEQSPQEPDSSSGIGKTGQQPAKKRLNFGQTGDSESVPDPQPLGEPPATPAAVGPTTMASGGGAPMADNNEGADGVGNASGNWHCDSTWLGDRVITTSTRTWALPTYNNHLYKQISSASTGASNDNHYFGYSTPWGYFDFNRFHCHFSPRDWQRLINNNWGFRPKRLNFKLFNIQVKEVTTNDGVTTIANNLTSTVQVFSDSEYQLPYVLGSAHQGCLPPFPADVFMIPQYGYLTLNNGSQAVGRSSFYCLEYFPSQMLRTGNNFTFSYTFEEVPLHSSCAHSQSLDRLMNPLIDQYLYYLNRTQNQSGSAQNRDLLFSRGSPAGMSVQPKNWLPGPCYRQQRVSKTKTDNNNSNFTWTGASKYNLNGRESIINPGTAMASHKDDEDKFFPMSGVMIFGKESAGASNTALDNVMITDEEEIKATNPVATERFGTVAVNFQSSSTDPATGDVHAMGALPGMVWQDRDVYLQGPIWAKIPHTDGHFHPSPLMGGFGLKNPPPQILIKNTPVPANPPAEFSATKFASFITQYSTGQVSVEIEWELQKENSKRWNPEVQYTSNYAKSANVDFTVDNNGLYTEPRPIGTRYLTRPL

SEQ ID NO: 283 - DNA, 2208 bp, Artificial Sequence
  source: /note="Description of Artificial Sequence: Synthetic polynucleotide"
atggctgccgatggctatcttccagattggctcgaggacactctctctgaaggaataagacagtggtggaagctcaaacctggcccaccaccaccaaagcccgcagagcggcatagggacgacagcaggggtcttgtgcttcctgggtacaagtacctcggacccttcaacggactcgacaagggagagccggtcaacgaggcagacgccgcggccctcgagcacgacaaagcctacgaccggcagctcgacagcggagacaacccgtacctcaagtacaaccacgccgacgcggagtttcaggagcgccttaaagaagatacgtcttttgggggcaacctcggacgagcagtcttccaggcgaaaaagagggttcttgaacctctgggcctggttggggaacctgttaagacggctccgggaaaaaagaggccggtagagcactctcctgtggagccagactcctcctcgggaaccggaaaggcgggccagcagcctgcaagaaaaagattgaattttggtcagactggagacgcagactcagtacctgacccccagcctctcggacagccaccagcagccccctctggtctgggaactaatacgatggctacaggcagtggcgcaccaatggcagacaataacgagggcgccgacggagtgggtaattcctcgggaaattggcattgcgattccacatggatgggcgacagagtcatcaccaccagcacccgaacctgggccctgcccacctacaacaaccacctctacaaacaaatttccagccaatcaggagcctcgaacgacagtcactactttggctacagcaccccttgggggtattttgacttcaacagattccactgccacttttcaccacgtgactggcaaagactcatcaacaacaactggggattccgacccaagagactcaacttcaagctctttaacattcaagtcaaagaggtcacgcagaatgacggtacgacgacgattgccaataaccttaccagcacggttcaggtgtttactgactcggagtaccagctcccgtacgtcctcggctcggcgcatcaaggatgcctcccgccgttcccagcagacgtcttcatggtgccacagtatggatacctcaccctgaacaacgggagtcaggcagtaggacgctcttcattttactgcctggagtactttccttctcagatgctgcgtaccggaaacaactttaccttcagctacacttttgaggacgttcctttccacagcagctacgctcacagccagagtctggaccgtctcatgaatcctctcatcgaccagtacctgtattacttgagcacaacaaacactccaagtggaaccaccacgcagtcaaggctccagttttctcaggccggagcgagtgacattcgggaccagtctaggaactggcttcctggaccctgttaccgccagcagcgagtatcaaagacatctgcggataacaacaacagtgaatactcgtggactggagctaccaagtaccacctcaatggcagagactctctggtgaatccgggcccggccatggcaagccacaaggacaatgaagaaaagttttttcctcagagcggggttctcatctttgggaagcaaggctcagagaaaacaaatgtggacattgaaaaggtcatgattacagacgaagaggaaatcaggacaaccaatcccgtggctacggagcagtatggttctgtatctaccaacctccagagaggcaacagacaagcagctaccgcagatgtcaacacacaaggcgttcttccaggcatggtctggcaggacagagatgtgtaccttcaggggcccatctgggcaaagattccacacacggacggacattttcacccctctcccctcatgggtggattcggacttaaacaccctcctccacagattctcatcaagaacaccccggtacctgcgaatccttcgaccaccttcagtgcggcaaagtttgcttccttcatcacacagtactccacgggacaggtcagcgtggagatcgagtgggagctgcagaaggaaaacagcaaacgctggaatcccgaaattcagtacacttccaactacaacaagtctgttaatgtggactttactgtggacactaatggcgtgtattcagagcctcgccccattggcaccagatacctgactcgtaatctgtaa

SEQ ID NO: 284 - protein, 735 aa, Artificial Sequence
  source: /note="Description of Artificial Sequence: Synthetic polypeptide"
MAADGYLPDWLEDTLSEGIRQWWKLKPGPPPPKPAERHRDDSRGLVLPGYKYLGPFNGLDKGEPVNEADAAALEHDKAYDRQLDSGDNPYLKYNHADAEFQERLKEDTSFGGNLGRAVFQAKKRVLEPLGLVGEPVKTAPGKKRPVEHSPVEPDSSSGTGKAGQQPARKRLNFGQTGDADSVPDPQPLGQPPAAPSGLGTNTMATGSGAPMADNNEGADGVGNSSGNWHCDSTWMGDRVITTSTRTWALPTYNNHLYKQISSQSGASNDSHYFGYSTPWGYFDFNRFHCHFSPRDWQRLINNNWGFRPKRLNFKLFNIQVKEVTQNDGTTTIANNLTSTVQVFTDSEYQLPYVLGSAHQGCLPPFPADVFMVPQYGYLTLNNGSQAVGRSSFYCLEYFPSQMLRTGNNFTFSYTFEDVPFHSSYAHSQSLDRLMNPLIDQYLYYLSTTNTPSGTTTQSRLQFSQAGASDIRDQSRNWLPGPCYRQQRVSKTSADNNNSEYSWTGATKYHLNGRDSLVNPGPAMASHKDNEEKFFPQSGVLIFGKQGSEKTNVDIEKVMITDEEEIRTTNPVATEQYGSVSTNLQRGNRQAATADVNTQGVLPGMVWQDRDVYLQGPIWAKIPHTDGHFHPSPLMGGFGLKHPPPQILIKNTPVPANPSTTFSAAKFASFITQYSTGQVSVEIEWELQKENSKRWNPEIQYTSNYNKSVNVDFTVDTNGVYSEPRPIGTRYLTRNL

SEQ ID NO: 285 - protein, 737 aa, Artificial Sequence
  source: /note="Description of Artificial Sequence: Synthetic polypeptide"
RMAADGYLPDWLEDNLSEGIREWWDLKPGAPKPKANQQKQDDGRGLVLPGYKYLGPFNGLDKGEPVNAADAAALEHDKAYDQQLKAGDNPYLRYNHADAEFQERLQEDTSFGGNLGRAVFQAKKRVLEPLGLVEEGAKTAPGKKRPVEQSPQEPDSSSGIGKTGQQPAKKRLNFGQTGDSESVPDPQPLGEPPATPAAVGPTTMASGGGAPMADNNEGADGVGNASGNWHCDSTWLGDRVITTSTRTWALPTYNNHLYKQISSTSTGASNDNHYFGYGTPWGYFDFNRFHCHFSPRDWQRLINNNWGFRPKRLNFKLFNIQVEEVTTNDGVTTIANNLTSTVQVFSDSEYQLPYVLGSAHQGCLPPFPADVFMIPQYGYLTLNNGSQAVGRSSFYCLEYFPSQMLRTGNNFTFSYTFEEVPFHSSYAHSQSLDRLMNPLIDQYLYYLNRTQNQSGSAQNKDLLFSRGSPAGMSVQPKNWLPGPCYRQQRVSKTKTDNNNSNFTWTGASKYNLNGRESIINPGTAVASHKDDEDKFFPMSGVMIFGKESAGASSTALDNVMITDEEEIKATNPVATERFGTVAVNFQSSSTDPATGDVHAMGALPGMVWQDRDVYLQGPIWAKIPHTDGHFHPSPLMGGFGLKNPPPQILIKNTPVPANPPAEFSATKFASFITQYSTGQVSVEIEWELQKENSKRWNPEVQYTSNYAKSANVDFTVDNNGLYTEPRPIGTRYLTRPL

SEQ ID NO: 286 - protein, 736 aa, Artificial Sequence
  source: /note="Description of Artificial Sequence: Synthetic polypeptide"
MAADGYLPDWLEDNLSEGIREWWDLKPGAPKPKANQQKQDDGRGLVLPGYKYLGPFNGLDKGEPVNAADAAALEHDKAYDQQLKAGDNPYLRYNHADAEFQERLQEDTSFGGNLGRAVFQAKKRVLEPLGLVEEGAKTAPGKKRPVEQSPQEPDSSSGIGKTGQQPAKKRLNFGQTGDSESVPDPQPLGEPPATPAAVGPTTMASGGGAPMADNNEGADGVGNASGNWHCDSTWLGDRVITTSTRTWALPTYNNHLYKQISSTSTGASNDNHYFGYGTPWGYFDFNRFHCHFSPRDWQRLINNNWGFRPKRLNFKLFNIQVEEVTTNDGVTTIANNLTSTVQVFSDSEYQLPYVLGSAHQGCLPPFPADVFMIPQYGYLTLNNGSQAVGRSSFYCLEYFPSQMLRTGNNFTFSYTFEEVPFHSSYAHSQSLDRLMNPLIDQYLYYLNRTQNQSGSAQNKDLLFSRGSPAGMSVQPKNWLPGPCYRQQRVSKTKTDNNNSNFTWTGASKYNLNGRESIINPGTAVASHKDDEDKFFPMSGVMIFGKESAGASSTALDNVMITDEEEIKATNPVATERFGTVAVNFQSSSTDPATGDVHAMGALPGMVWQDRDVYLQGPIWAKIPHTDGHFHPSPLMGGFGLKNPPPQILIKNTPVPANPPAEFSATKFASFITQYSTGQVSVEIEWELQKENSKRWNPEVQYTSNYAKSANVDFTVDNNGLYTEPRPIGTRYLTRPL

SEQ ID NO: 287 - DNA, 2211 bp, Artificial Sequence
  source: /note="Description of Artificial Sequence: Synthetic polynucleotide"
atggctgccgatggttatcttccagattggctcgaggacaacctctctgagggcattcgcgagtggtgggacttgaaacctggagccccgaagcccaaagccaaccagcaaaagcaggacgacggccggggtctggtgcttcctggctacaagtacctcggacccttcaacggactcgacaagggggagcccgtcaacgcggcggacgcagcggccctcgagcacgacaaggcctacgaccagcagctcaaagcgggtgacaatccgtacctgcggtataaccacgccgacgccgagtttcaggagcgtctgcaagaagatacgtcttttgggggcaacctcgggcgagcagtcttccaggccaagaagcgggttctcgaacctctcggtctggttgaggaaggcgctaagacggctcctggaaagaaacgtccggtagagcagtcgccacaagagccagactcctcctcgggcatcggcaagacaggccagcagcccgctaaaaagagactcaattttggccagactggcgactcagagtcagtccccgatccacaacctctcggagaacctccagcaacccccgctgctgtgggacctactacaatggcttcaggcggtggcgcaccaatggcagacaataacgaaggcgccgacggagtgggtaatgcctcaggaaattggcattgcgattccacatggctgggcgacagagtcatcaccaccagcacccgcacctgggccttgcccacctacaataaccacctctacaagcaaatctccagtacttcaacgggggccagcaacgacaaccactacttcggctacggcaccccctgggggtattttgatttcaacagattccactgccacttttcaccacgtgactggcagcgactcatcaacaacaattggggattccggcccaagagactcaacttcaaactcttcaacatccaagtcgaggaggtcacgacgaatgatggcgtcacaaccatcgctaataaccttaccagcacggttcaagtcttctcggactcggagtaccagcttccgtacgtcctcggctctgcgcaccagggctgcctccctccgttcccggcggacgtgttcatgattccgcaatacggctacctgacgctcaacaatggcagccaagccgtgggacgttcatccttttactgcctggaatatttcccttctcagatgctgagaacgggcaacaactttaccttcagctacacctttgaggaagtgcctttccacagcagctacgcgcacagccagagcctggaccggctgatgaatcctctcatcgaccaatacctgtattacctgaacagaacacaaaatcagtccggaagtgcccaaaacaaggacttgctgtttagccgtgggtctccagctggcatgtctgttcagcccaaaaactggctacctggaccctgttatcggcagcagcgcgtttctaaaacaaaaacagacaacaacaacagcaattttacctggactggtgcttcaaaatataacctcaatgggcgtgaatccatcatcaaccctggcaccgctgtggcctcacacaaagacgacgaagacaagttctttcccatgagcggtgtcatgatttttggaaaagagagcgccggagcttcaagcactgcattggacaatgtcatgattacagacgaagaggaaattaaagccactaaccctgtggccaccgaaagatttgggaccgtggcagtcaatttccagagcagcagcacagaccctgcgaccggagatgtgcatgctatgggagcattacctggcatggtgtggcaagatagagacgtgtacctgcagggtcccatttgggccaaaattcctcacacagatggacactttcacccgtctcctcttatgggcggctttggactcaagaacccgcctcctcagatcctcatcaaaaacacgcctgttcctgcgaatcctccggcggagttttcagctacaaagtttgcttcattcatcacccaatactccacaggacaagtgagtgtggaaattgaatgggagctgcagaaagaaaacagcaagcgctggaatcccgaagtgcagtacacatccaattatgcaaaatctgccaacgttgattttactgtggacaacaatggactttatactgagcctcgccccattggcacccgttaccttacccgtcccctgtaa

SEQ ID NO: 288 - protein, 737 aa, Artificial Sequence
  source: /note="Description of Artificial Sequence: Synthetic polypeptide"
RMAADGYLPDWLEDNLSEGIREWWDLKPGAPKPKANQQKQDDGRGLVLPGYKYLGPFNGLDKGEPVNAADAAALEHDKAYDQQLKAGDNPYLRYNHADAEFQERLQEDTSFGGNLGRAVFQAKKRVLEPLGLVEEGAKTAPGKKRPVEQSPQEPDSSSGIGKTGQQPAKKRLNFGQTGDSESVPDPQPLGEPPATPAAVGPTTMASGGGAPMADNNEGADGVGNASGNWHCDSTWLGDRVITTSTRTWALPTYNNHLYKQISSTSTGASNDNHYFGYSTPWGYFDFNRFHCHFSPRDWQRLINNNWGFRPKRLNFKLFNIQVEEVTTNDGVTTIANNLTSTVQVFSDSEYQLPYVLGSAHQGCLPPFPADVFMIPQYGYLTLNNGSQAVGRSSFYCLEYFPSQMLRTGNNFTFSYTFEEVPFHSSYAHSQSLDRLMNPLIDQYLYYLNRTQNQSGSAQNKDLLFSRGSPAGMSVQPKNWLPGPCYRQQRVSKTKTDNNNSNFTWTGASKYNLNGRESIINPGTAVASHKDDEDKFFPMSGVMIFGKESAGASSTALDNVMITDEEEIKATNPVATERFGTVAVNFQSSSTDPATGDVHAMGALPGMVWQDRDVYLQGPIWAKIPHTDGHFHPSPLMGGFGLKNPPPQILIKNTPVPANPPAEFSATKFASFITQYSTGQVSVEIEWELQKENSKRWNPEVQYTSNYAKSANVDFTVDNNGLYTEPRPIGTRYLTRPL

SEQ ID NO: 289 - protein, 737 aa, Artificial Sequence
  source: /note="Description of Artificial Sequence: Synthetic polypeptide"
RMAADGYLPDWLEDNLSEGIREWWDLKPGAPKPKANQQKQDDGRGLVLPGYKYLGPFNGLDKGEPVNAADAAALEHDKAYDQQLKAGDNPYLRYNHADAEFQERLQEDTSFGGNLGRAVFQAKKRVLEPLGLVEEGAKTAPGKKRPVEQSPQEPDSSSGIGKTGQQPAKKRLNFGQTGDSESVPDPQPLGEPPATPAAVGPTTMASGGGAPMADNNEGADGVGNASGNWHCDSTWLGDRVITTSTRTWALPTYNNHLYKQISSTSTGASNDNHYFGYSTPWGYFDFNRFHCHFSPRDWQRLINNNWGFRPKRLNFKLFNIQVKEVTTNDGVTTIANNLTSTVQVFSDSEYQLPYVLGSAHQGCLPPFPADVFMIPQYGYLTLNNGSQAVGRSSFYCLEYFPSQMLRTGNNFTFSYTFEEVPFHSSYAHSQSLDRLMNPLIDQYLYYLNRTQNQSGSAQNKDLLFSRGSPAGMSVQPKNWLPGPCYRQQRVSKTKTDNNNSNFTWTGASKYNLNGRESIINPGTAVASHKDDEDKFFPMSGVMIFGKESAGASSTALDNVMITDEEEIKATNPVATERFGTVAVNFQSSSTDPATGDVHAMGALPGMVWQDRDVYLQGPIWAKIPHTDGHFHPSPLMGGFGLKNPPPQILIKNTPVPANPPAEFSATKFASFITQYSTGQVSVEIEWELQKENSKRWNPEVQYTSNYAKSANVDFTVDNNGLYTEPRPIGTRYLTRPL

SEQ ID NO: 290 - protein, 737 aa, Artificial Sequence
  source: /note="Description of Artificial Sequence: Synthetic polypeptide"
RMAADGYLPDWLEDNLSEGIREWWDLKPGAPKPKANQQKQDDGRGLVLPGYKYLGPFNGLDKGEPVNAADAAALEHDKAYDQQLKAGDNPYLRYNHADAEFQERLQEDTSFGGNLGRAVFQAKKRVLEPLGLVEEGAKTAPGKKRPVEQSPQEPDSSSGIGKTGQQPAKKRLNFGQTGDSESVPDPQPLGEPPATPAAVGPTTMASGGGAPMADNNEGADGVGNASGNWHCDSTWLGDRVITTSTRTWALPTYNNHLYKQISSTSTGASNDNHYFGYSTPWGYFDFNRFHCHFSPRDWQRLINNNWGFRPKRLNFKLFNIQVKEVTTNDGVTTIANNLTSTVQVFSDSEYQLPYVLGSAHQGCLPPFPADVFMIPQYGYLTLNNGSQAVGRSSFYCLEYFPSQMLRTGNNFTFSYTFEEVPFHSSYAHSQSLDRLMNPLIDQYLYYLNRTQNQSGSAQNKDLLFSRGSPAGMSVQPKNWLPGPCYRQQRVSKTKTDNNNSNFTWTGASKYNLNGRESIINPGTAVASHKDDEDKFFPMSGVMIFGKESAGANSTALDNVMITDEEEIKATNPVATERFGTVAVNFQSSSTDPATGDVHAMGALPGMVWQDRDVYLQGPIWAKIPHTDGHFHPSPLMGGFGLKNPPPQILIKNTPVPANPPAEFSATKFASFITQYSTGQVSVEIEWELQKENSKRWNPEVQYTSNYAKSANVDFTVDNNGLYTEPRPIGTRYLTRPL

SEQ ID NO: 291 - DNA, 2208 bp, Artificial Sequence
  source: /note="Description of Artificial Sequence: Synthetic polynucleotide"
atggctgccgatggttatcttccagattggctcaaggacactctctctgaaggaataagacagtggtggaagctcaaacctggcccaccaccaccaaagcccgcagagcggcataaggacgacagcgggggtcttgtgcttcctgggtacaagtacctcggacccttcaacggactcgacaagggagagccggtcaacgaggcagacgccgcggccctcgagtacgacaaggcctacgaccggcagctcgacagcggagacaacccgtacctcaagtacaaccacgccgacgcggagtttcaggagcgccttaaagaagatacgtcttttgggggcaacctcggacgagcagtcttccaggcgaaaaagagggttcttgaacctctgggcctggttgaggaacctgttaagacggctccgggaaaaaagaggccggtagagcactctcctgtggagccagactcctcctcgggaacaggaaaagcgggccagcagcctgcgagaaagagattgaattttggtcagactggagacgcagactccgtacctgacccccagcctctcggacagccaccagcagccccctctggtctgggaactaatacgatggctacaggcagtggcgcaccaatggcagacaataacgagggcgccgacggagtgggtaattcctcgggaagttggcattgcgattccacatggatgggcgacagagtcatcaccaccagcacccgaacctgggctctgcccacctacaacaaccatctgtacaagcagatctccagccaatcaggagccagcaacgacaaccactactttggctacagcaccccttgggggtattttgacttcaacagattccactgccacttttcaccacgtgactggcaaagactcatcaacaacaactggggattccggcccaagagactcaacttcaagctctttaacattcaagtcaaggaggtcacgcagaatgacggtacgacgacgattgccaataaccttaccagcacggttcaggtgtttactgactcggagtaccagctcccgtacgtccccggctcggcgcatcaaggatgcctcccgccgttcccagcagacgtcttcatggtgccacagtatggatacctcaccctgaacaacgggagtcaggcagtaggacgctcttcattttactgcctggagtactttccttctcagatgcttcgtaccggaaacaactttaccttcagctacacctttgaggatgttcctttccacagcagctacgctcacagccagagtttggaccgtctcatgaatcctctcatcgaccagtacctgtattacttgagcagaacaaacactccaagcggaaccaccacgcagtccaggcttcagttttctcaggccggagcaagtgacattcgggaccagtctaggaactggcttcctggaccctgttaccgccagcagcgagtatcaaagacagctgcggacaacaacaacagtgaatactcgtggactggagctaccaagtaccacctcaatggcagagactctctggtgaatccgggcccggccatggccagccacaaggacgatgaagaaaagttttttcctcaaagcggggttctcatctttgggaagcaaggctcagagaaaacaaatgtggacattgaaaaggtcatgattacagacgaagaggaaatcagaaccaccaatcccgtggccacggagcagtatggttctgtatctaccaacctccagagcggcaacacacaagcagctactgcagatgtcaacacacaaggcgttcttccaggcatggtctggcaggacagagacgtgcacctgcaggggcctatctgggcaaagattccacacacggacggacattttcacccctctcccctcatgggcggatttggacttaaacaccctcctccacagattctcatcaagaacaccccggtacctgcaaatccttcgaccaccttcagtgcggcaaagtttgcttccttcatcacacagtattccacagggcaggtcagcgtggagatcgagtgggagctgcagaaggagaacagcaaacgctggaaccccgagatccagtacacttccaactacaacaaatctgttaatgtggactttactgtggacactaatggtgtgtattcagagcctcgccccattggcaccagatacctgactcgtaatctgtaa

SEQ ID NO: 292 - protein, 735 aa, Artificial Sequence
  source: /note="Description of Artificial Sequence: Synthetic polypeptide"
MAADGYLPDWLKDTLSEGIRQWWKLKPGPPPPKPAERHKDDSGGLVLPGYKYLGPFNGLDKGEPVNEADAAALEYDKAYDRQLDSGDNPYLKYNHADAEFQERLKEDTSFGGNLGRAVFQAKKRVLEPLGLVEEPVKTAPGKKRPVEHSPVEPDSSSGTGKAGQQPARKRLNFGQTGDADSVPDPQPLGQPPAAPSGLGTNTMATGSGAPMADNNEGADGVGNSSGSWHCDSTWMGDRVITTSTRTWALPTYNNHLYKQISSQSGASNDNHYFGYSTPWGYFDFNRFHCHFSPRDWQRLINNNWGFRPKRLNFKLFNIQVKEVTQNDGTTTIANNLTSTVQVFTDSEYQLPYVPGSAHQGCLPPFPADVFMVPQYGYLTLNNGSQAVGRSSFYCLEYFPSQMLRTGNNFTFSYTFEDVPFHSSYAHSQSLDRLMNPLIDQYLYYLSRTNTPSGTTTQSRLQFSQAGASDIRDQSRNWLPGPCYRQQRVSKTAADNNNSEYSWTGATKYHLNGRDSLVNPGPAMASHKDDEEKFFPQSGVLIFGKQGSEKTNVDIEKVMITDEEEIRTTNPVATEQYGSVSTNLQSGNTQAATADVNTQGVLPGMVWQDRDVHLQGPIWAKIPHTDGHFHPSPLMGGFGLKHPPPQILIKNTPVPANPSTTFSAAKFASFITQYSTGQVSVEIEWELQKENSKRWNPEIQYTSNYNKSVNVDFTVDTNGVYSEPRPIGTRYLTRNL

SEQ ID NO: 293 - DNA, 2208 bp, Artificial Sequence
  source: /note="Description of Artificial Sequence: Synthetic polynucleotide"
atggctgccgatggttatcttccagattggctcgaggacactctctctgaaggaataagacagtggtggaagctcaaacctggcccaccaccaccaaagcccgcagagcggcataaggacgacagcaggggtcttgtgcttcctgggtacaagtacctcggacccttcaacggactcgacaagggggagccggtcaacgaggcagacgccgcggccctcgagcacgacaaggcctacgaccggcagctcgacagcggagacaacccgtacctcaagtacaaccacgccgacgcagagtttcaggagcgccttaaagaagatacgtcttttgggggcaacctcggacgagcagtcttccaggcgaaaaagagggttcttgaacctctgggcctggttgaggaacctgttaagacggctccgggaaaaaagaggccggtagagcactctcctgtggagccagactcctcctcgggaaccggaaaagcgggccagcagcctgcaagaaaaagattaaattttggtcagactggagacgcagactccgtacctgacccccagcctctcggacagccaccagcagccccctctggtctgggatctactacaatggctacaggcagtggcgcaccaatggcagacaataacgagggtgccgatggagtgggtaattcctcaggaaattggcattgcgattcccaatggctgggcgacagagtcatcaccaccagcacccgaacctgggccctgcccacatacaacaaccacctctacaagcaaatctccagccaatcaggagccagcaacgacaaccactactttggctacagcaccccctgggggtattttgacttcaacagattccactgccacttttcaccacgtgactggcaaagactcatcaacaacaactggggattccggcccaaaagactcaacttcaagctctttaatattcaagtcaaagaggtcacgcagaatgacggtacgacgacgattgccaataaccttaccagcacggttcaggtgtttactgactcggagtaccagctcccgtacgtcctgggctcggcgcatcaaggatgcctcccgccgtttccagcggacgtcttcatggtcccacagtatggatacctcaccctgaacaacgggagtcaggcggtaggacgctcttccttttactgcctggagtactttccttctcagatgctgcgtactggaaacaactttcagttcagctacacttttgaagacgtgcctttccacagcagctacgctcacagccagagtctggatcggctgatgaatcctctgatcgaccagtacctgtattatctgaacaagacacaaacaaatagtggaactcttcagcagtctcggctactgtttagccaagctggaccaaccaacatgtctcttcaagctaaaaactggctgcctggaccttgctacagacagcagcgtctgtcaaaacaggcaaacgacaacaacaacagcaactttccctggactgcagctacaaagtatcatctaaatggccgggactcgttggttaatccaggaccagctatggccagtcgcaaggatgacgaagaaaagtttttccccatgcatggaaccctgatatttggtaaacaaggaacaaatgccaacgacgcggatttggaaaatgtcatgattacagatgaagaagaaatcagggccaccaatcccgtggctacggagcagtacgggactgtgtcaaataatttgcaaaactcaaacactggtccaactactggaactgtcaatcaccaaggagcgttacctggtatggtgtggcaggatcgagacgtgtacctgcagggacccatttgggccaagattcctcacaccgatggacactttcatccttctccactgatgggaggttttggactcaaacacccgcctcctcagatcatgatcaaaaacactcccgttccagccaatcctcccacaaacttcagttctgccaagtttgcttctttcatcacacagtattccacgggacaggtcagcgtggagatcgagtgggagctgcagaaggagaacagcaaacgctggaatcccgaaattcagtacacttccaactacaacaagtctgttaatgtggactttactgtggacactaatggtgtgtattcagagcctcgccccattggcaccagatacctgactcgtaatctgtaa

SEQ ID NO: 294 - protein, 735 aa, Artificial Sequence
  source: /note="Description of Artificial Sequence: Synthetic polypeptide"
MAADGYLPDWLEDTLSEGIRQWWKLKPGPPPPKPAERHKDDSRGLVLPGYKYLGPFNGLDKGEPVNEADAAALEHDKAYDRQLDSGDNPYLKYNHADAEFQERLKEDTSFGGNLGRAVFQAKKRVLEPLGLVEEPVKTAPGKKRPVEHSPVEPDSSSGTGKAGQQPARKRLNFGQTGDADSVPDPQPLGQPPAAPSGLGSTTMATGSGAPMADNNEGADGVGNSSGNWHCDSQWLGDRVITTSTRTWALPTYNNHLYKQISSQSGASNDNHYFGYSTPWGYFDFNRFHCHFSPRDWQRLINNNWGFRPKRLNFKLFNIQVKEVTQNDGTTTIANNLTSTVQVFTDSEYQLPYVLGSAHQGCLPPFPADVFMVPQYGYLTLNNGSQAVGRSSFYCLEYFPSQMLRTGNNFQFSYTFEDVPFHSSYAHSQSLDRLMNPLIDQYLYYLNKTQTNSGTLQQSRLLFSQAGPTNMSLQAKNWLPGPCYRQQRLSKQANDNNNSNFPWTAATKYHLNGRDSLVNPGPAMASRKDDEEKFFPMHGTLIFGKQGTNANDADLENVMITDEEEIRATNPVATEQYGTVSNNLQNSNTGPTTGTVNHQGALPGMVWQDRDVYLQGPIWAKIPHTDGHFHPSPLMGGFGLKHPPPQIMIKNTPVPANPPTNFSSAKFASFITQYSTGQVSVEIEWELQKENSKRWNPEIQYTSNYNKSVNVDFTVDTNGVYSEPRPIGTRYLTRNL

SEQ ID NO: 295 - DNA, 2208 bp, Artificial Sequence
  source: /note="Description of Artificial Sequence: Synthetic polynucleotide"
atggctgccgatggttatcttccagattggctcgaggacactctctctgaaggaataagacagtggtggaagctcaaacctggcccaccaccaccaaagcccgcagagcggcataaggacgacagcaggggtcttgtgcttcctgggtacaagtacctcggacccttcaacggactcgacaagggagagccggtcaacgaggcagacgccgcggccctcgagcacgacaaagcctacgaccggcagctcgacagcggagacaacccgtacctcaagtacaaccacgccgacgcggagtttcaggagcgccttaaagaagatacgtcttttgggggcaacctcggacgagcagtcttccaggcgaaaaagagggttcttgaacctctgggcctggttggggaacctgtcaagacggctccaggaaaaaagaggccggtagagcactctcctgtggagccagactcctcctcgggaaccggaaaggcgggccagcagcctgcaagaaaaagattgaattttggtcagactggagacgcagactcagtacctgacccccagcctctcggacagccaccagcagccccctctggtctgggaactaatacgatggctacaggcagtggcgcaccaatggcagacaataacgagggcgccgacggagtgggtaattcctcgggaaattggcattgcgattccacatggatgggcgacagagtcatcaccaccagcacccgaacctgggccctgcccacctacaacaaccacctctacaaacaaatttccagccaatcaggagcctcgaacgacaatcactactttggctacagcaccccttgggggtattttgacttcaacagattccactgccacttttcaccacgtgactggcaaagactcatcaacaacaactggggattccgacccaagagactcaacttcaagctctttaacattcaagtcaaagaggtcacgcagaatgacggtacgacgacgattgccaataaccttaccagcacggttcaggtgtttactgactcggagtaccagctcccgtacgtcctcggctcggcgcatcaaggatgcctcccgccgttcccagcagacgtcttcatggtgccacagtatggatacctcaccctgaacaacgggagtcaggcagtaggacgctcttcattttactgcctggagtactttccttctcagatgctgcgtaccggaaacaactttaccttcagctacacttttgaggacgttcctttccacagcggctacgctcacagccagagtctggaccgtctcatgaatcctctcatcgaccagtacctgtattacttgagcacaacaaacactccaagtggaaccaccacgcagtcaaggcttcagttttctcaggccggagcgagtgacattcgggaccagtctaggaactggcttcctggaccctgttaccgccagcagcgagtatcaaagacatctgcggataacaacaacagtgaatactcgtggactggagctaccaagtaccacctcaatggcagagactctctggtgaatccgggcccggccatggcaagccacaaggacaatgaagaaaagttttttcctcagagcggggttctcatctttgggaagcaaggctcagagaaaacaaatgtggacattgaaaaggtcatgattacagacgaagaggaaatcaggacaaccaatcccgtggctacggagcagtacggttctgtatctaccaacctccagagaggcaacagacaagcagctaccgcagatgtcaacacacaaggcgttcttccaggcatggtctggcaggacagagatgtgtaccttcaggggcccatctgggcaaagattccacacacggacggacattttcacccctctcccctcatgggtggattcggacttaaacaccctcctccacagattctcatcaagaacaccccggtacctgcgaatccttcgaccaccttcagtgcggcaaagtttgcttccttcatcacacagtactccacgggacaggtcagcgtggagatcgagtgggagctgcagaaggaaaacagcaaacgctggaatcccgaaattcagtacacttccaactacaacaagtctgttaatgtggactttactgtggacactaatggcgtgtattcagagcctcgccccattggcaccagatacctgactcgtaatctgtaa

SEQ ID NO: 296 - protein, 735 aa, Artificial Sequence
  source: /note="Description of Artificial Sequence: Synthetic polypeptide"
MAADGYLPDWLEDTLSEGIRQWWKLKPGPPPPKPAERHKDDSRGLVLPGYKYLGPFNGLDKGEPVNEADAAALEHDKAYDRQLDSGDNPYLKYNHADAEFQERLKEDTSFGGNLGRAVFQAKKRVLEPLGLVGEPVKTAPGKKRPVEHSPVEPDSSSGTGKAGQQPARKRLNFGQTGDADSVPDPQPLGQPPAAPSGLGTNTMATGSGAPMADNNEGADGVGNSSGNWHCDSTWMGDRVITTSTRTWALPTYNNHLYKQISSQSGASNDNHYFGYSTPWGYFDFNRFHCHFSPRDWQRLINNNWGFRPKRLNFKLFNIQVKEVTQNDGTTTIANNLTSTVQVFTDSEYQLPYVLGSAHQGCLPPFPADVFMVPQYGYLTLNNGSQAVGRSSFYCLEYFPSQMLRTGNNFTFSYTFEDVPFHSGYAHSQSLDRLMNPLIDQYLYYLSTTNTPSGTTTQSRLQFSQAGASDIRDQSRNWLPGPCYRQQRVSKTSADNNNSEYSWTGATKYHLNGRDSLVNPGPAMASHKDNEEKFFPQSGVLIFGKQGSEKTNVDIEKVMITDEEEIRTTNPVATEQYGSVSTNLQRGNRQAATADVNTQGVLPGMVWQDRDVYLQGPIWAKIPHTDGHFHPSPLMGGFGLKHPPPQILIKNTPVPANPSTTFSAAKFASFITQYSTGQVSVEIEWELQKENSKRWNPEIQYTSNYNKSVNVDFTVDTNGVYSEPRPIGTRYLTRNL

SEQ ID NO: 297 - DNA, 2208 bp, Artificial Sequence
  source: /note="Description of Artificial Sequence: Synthetic polynucleotide"
atggctgccgatggttatcttccagattggctcgaggacactctctctgaaggaataagacagtggtggaagctcaaacctggcccaccaccaccaaagcccgcagagcggcataaggacgacagcaggggtcttgtgcttcctgggtacaagtacctcggacccttcaacggactcgacaagggagagccggtcaacgaggcagacgccgcggccctcgagcacgacaaagcctacgaccggcagctcgacagcggagacaacccgtacctcaagtacaaccacgccgacgcggagtttcaggagcgccttaaagaagatacgtcttttgggggcaacctcggacgagcagtcttccaggcgaaaaagagggttcttgaacctctgggcctggttggggaacctgttaagacggctccgggaaaaaagaggccggtagagcactctcctgtggagccagactcctcctcgggaaccggaaaggcgggccagcagcctgcaagaaaaagattgaattttggtcagactggagacgcagactcagtacctgacccccagcctctcggacagccaccagcagccccctctggtctgggaactaatacgatggctacaggcagtggcgcaccaatggcagacaataacgagggcgccgacggagtgggtaattcctcgggaaatcggcattgcgattccacatggatgggcgacagagtcatcaccaccagcacccgaacctgggccctgcccacctacaacaaccacctctacagacaaatttccagccaatcaggagcctcgaacgacaatcactactttggctacagcaccccttgggggtattttgacttcaacagattccactgccacttttcaccacgtgactggcaaagactcatcaacaacaactggggattccgacccaagagactcaacttcaagctctttaacattcaagtcaaagaggtcacgcagaatgacggtacgacgacgattgccaataaccttaccagcacggttcaggtgtttactgactcggagtaccagctcccgtacgtcctcggctcggcgcatcaaggatgcctcccgccgttcccagcagacgtcttcatggtgccacagtatggatacctcaccctgagcaacgggagtcaggcagtaggacgctcttcattttactgcccggagtactttccttctcagatgctgcgtaccggaaacaactttaccttcagctacacttttgaggacgttcctttccacagcagctacgctcacagccagagtctggaccgtctcatgaatcctctcatcgaccagtacctgtattacttgagcacaacaaacactccaagtggaaccaccacgcagtcaaggcttcagttttctcaggccggagcgagtgacattcgggaccagtctaggaactggcttcctggaccctgttaccgccagcagcgagtatcaaagacatctgcggataacaacaacagtgaatactcgtggactggagctaccaagtaccacctcaatggcagagactctctggtgaatccgggcccggccatggcaagccacaaggacaatgaagaaaagttttttcctcagagcggggttctcatctttgggaagcaaggctcagagaaaacaaatgtggacattgaaaaggtcatgattacagacgaagaggaaatcaggacaaccaatcccgtggctacggagcagtatggttctgtatctaccaacctccagagaggcaacagacaagcagctaccgcagatgtcaacacacaaggcgttcttccaggcatggtctggcaggacagagatgtgtaccttcaggggcccatctgggcaaagattccacacacggacggacattttcacccctctcccctcatgggtggattcggacctaaacaccctcctccacagattctcatcaagaacaccccggtacctgcgaatccttcgaccaccttcagtgcggcaaagtttgcttccttcatcacacagtactccacgggacaggtcagcgtggagatcgagtgggagctgcagaaggaaaacagcaaacgctggaatcccgaaattcagtacacttccaactacaacaagtctgttaatgtggactttactgtggacactaatggcgtgtattcagagcctcgccccattggcaccagatacctgactcgtaatttgtaa

SEQ ID NO: 298 - protein, 735 aa, Artificial Sequence
  source: /note="Description of Artificial Sequence: Synthetic polypeptide"
MAADGYLPDWLEDTLSEGIRQWWKLKPGPPPPKPAERHKDDSRGLVLPGYKYLGPFNGLDKGEPVNEADAAALEHDKAYDRQLDSGDNPYLKYNHADAEFQERLKEDTSFGGNLGRAVFQAKKRVLEPLGLVGEPVKTAPGKKRPVEHSPVEPDSSSGTGKAGQQPARKRLNFGQTGDADSVPDPQPLGQPPAAPSGLGTNTMATGSGAPMADNNEGADGVGNSSGNRHCDSTWMGDRVITTSTRTWALPTYNNHLYRQISSQSGASNDNHYFGYSTPWGYFDFNRFHCHFSPRDWQRLINNNWGFRPKRLNFKLFNIQVKEVTQNDGTTTIANNLTSTVQVFTDSEYQLPYVLGSAHQGCLPPFPADVFMVPQYGYLTLSNGSQAVGRSSFYCPEYFPSQMLRTGNNFTFSYTFEDVPFHSSYAHSQSLDRLMNPLIDQYLYYLSTTNTPSGTTTQSRLQFSQAGASDIRDQSRNWLPGPCYRQQRVSKTSADNNNSEYSWTGATKYHLNGRDSLVNPGPAMASHKDNEEKFFPQSGVLIFGKQGSEKTNVDIEKVMITDEEEIRTTNPVATEQYGSVSTNLQRGNRQAATADVNTQGVLPGMVWQDRDVYLQGPIWAKIPHTDGHFHPSPLMGGFGPKHPPPQILIKNTPVPANPSTTFSAAKFASFITQYSTGQVSVEIEWELQKENSKRWNPEIQYTSNYNKSVNVDFTVDTNGVYSEPRPIGTRYLTRNL

SEQ ID NO: 299 - DNA, 2205 bp, Artificial Sequence
  source: /note="Description of Artificial Sequence: Synthetic polynucleotide"
atggctgccgatggttatcttccagattggctcgaggacactctctctgaaggaataagacagtggtggaagctcaaacctggcccaccaccaccaaagcccgcagagcggcataaggacgacagcaggggtcttgtgcttcctgggtacaagtacctcggacccttcaacggactcgacaagggagagccggtcaacgaggcagacgccgcggccctcgagcacgacaaggcctacgaccggcagctcgacagcggagacaacccgtacctcaagtacaaccacgccgacgcggagtttcaggagcgtcttaaagaagatacgtcttttgggggcaacctcggacgagcagtcttccaggcgaaaaagagggttcttgaacctctgggcctggttgaggaacctgttaagacggctccgggaaaaaagaggccggtagagcactctcctgcggagccagactcctcctcgggaaccggaaaagcgggccagcagcctgcaagaaaaagactgaatttcggtcagactggagacgcagactccgtacctgacccccagcctctcagacagccaccagcagcccccacaagtttgggatctactacaatggctacaggcagtggcgcaccaatggcagacaataacgagggtgccgatggagtgggtaattcctcaggaaattggcattgcgattcccaatggctgggcgacagagtcatcaccaccagcacccgaacctgggccctgcccacctacaacaaccacctttacaagcaaatctccagccaatcaggagcctcaaacgacaaccactactttggctacagcaccccctgggggtattttgacttcaacagattccactgccacttttcaccacgtgactggcaaagactcatcaacaacaactggggattccgacccaagagactcaacttcaagctctttaacattcaagtcaaagaggtcacgcagaatgacggtacgacgacgattgccaataaccttaccagcacggttcaggtgtttactgactcggagtaccagctcccgtacgtcctcggctcggcgcatcaaggatgcctcccgccgtttccagcggacgtcttcatggtcccacagtatggatacctcaccctgaacaacgggagtcaggcggtaggacgctcttccttttactgcctggagtactttccttctcagatgctgcgtactggaaacaactttcagttcagctacacttttgaagacgtgcctttccacagcagctacgctcacagccagagtttggatcggctgatgaatcctctgatcgaccagtacctgtattatctaaacagaacacaaacagctagtggaactcagcagtctcggctactgtttagccaagctggacccacaagcatgtctcttcaagctaaaaactggctgcctggaccgtgttatcgccagcagcgtttgtcaaagcaggcaaacgacaacaacaacagcaactttccctggactggagctaccaagtactacctcaatggcagagactctttggtgaacccgggcccggccatggccagccacaaggacgatgaagaaaagtttttccccatgcatggaaccctaatatttggtaaagaaggaacaaatgctaccaacgcggaattggaaaatgtcatgattacagatgaagaggaaatcaggaccaccaatcccgtggctacagagcagtacggatatgtgtcaaataatttgcaaaactcaaatactgctgcaagtactgaaactgtgaatcaccaaggagcattacctggtatggtgtggcaggatcgagacgtgtacctgcagggacccatttgggccaagattcctcacaccgatggacactttcatccttctccactgatgggaggttttggactcaaacacccgcctcctcagattatgatcaaaaacactcccgttccagccaatcctcccacaaacttcagttctgccaagtttgcttccttcatcacacagtattccacgggacaggtcagcgtggagatcgagtgggagctgcagaaggagaacagcaaacgctggaatcccgaaattcagtacacttccaactacaacaaatctgttaatgtggactttactgtggacactaatggtgtgtattcagagcctcgccccattggcaccagatacctgactcgtaatctgtaa

SEQ ID NO: 300 - protein, 734 aa, Artificial Sequence
  source: /note="Description of Artificial Sequence: Synthetic polypeptide"
MAADGYLPDWLEDTLSEGIRQWWKLKPGPPPPKPAERHKDDSRGLVLPGYKYLGPFNGLDKGEPVNEADAAALEHDKAYDRQLDSGDNPYLKYNHADAEFQERLKEDTSFGGNLGRAVFQAKKRVLEPLGLVEEPVKTAPGKKRPVEHSPAEPDSSSGTGKAGQQPARKRLNFGQTGDADSVPDPQPLRQPPAAPTSLGSTTMATGSGAPMADNNEGADGVGNSSGNWHCDSQWLGDRVITTSTRTWALPTYNNHLYKQISSQSGASNDNHYFGYSTPWGYFDFNRFHCHFSPRDWQRLINNNWGFRPKRLNFKLFNIQVKEVTQNDGTTTIANNLTSTVQVFTDSEYQLPYVLGSAHQGCLPPFPADVFMVPQYGYLTLNNGSQAVGRSSFYCLEYFPSQMLRTGNNFQFSYTFEDVPFHSSYAHSQSLDRLMNPLIDQYLYYLNRTQTASGTQQSRLLFSQAGPTSMSLQAKNWLPGPCYRQQRLSKQANDNNNSNFPWTGATKYYLNGRDSLVNPGPAMASHKDDEEKFFPMHGTLIFGKEGTNATNAELENVMITDEEEIRTTNPVATEQYGYVSNNLQNSNTAASTETVNHQGALPGMVWQDRDVYLQGPIWAKIPHTDGHFHPSPLMGGFGLKHPPPQIMIKNTPVPANPPTNFSSAKFASFITQYSTGQVSVEIEWELQKENSKRWNPEIQYTSNYNKSVNVDFTVDTNGVYSEPRPIGTRYLTRNL

SEQ ID NO: 301 - DNA, 3160 bp, Artificial Sequence
  source: /note="Description of Artificial Sequence: Synthetic polynucleotide"
acccttcactaaagggactagtcctgcaggtttaaacgaattcgcccttgctgcgtcaactggaccaatgagaactttcccttcaacgactgtgtcgacaagatggtgatttggtgggaggaggggaagatgaccgccaaggtcgtggagtcggccaaagccattctcggaggaagcaaggtgcgcgtggaccagaaatgcaagtcctcggcccagatagatccgactcccgtgatcgtcacctccaacaccaacatgtgcgccgtgattgacgggaactcaacgaccttcgaacaccagcagccgttgcaagaccggatgttcaaatttgaactcacccgccgtctggatcatgactttgggaaggtcaccaagcgggaagtcaaagactttttccggtgggcaaaggatcacgtggttgaggtggagcatgaattctacgtcaaaaagggtggagccaagaaaagacccgcccctagtgacgcagatataagtgagcccaaacgggtgcgcgagtcagttgcgcagccatcgacgtcagacgcggaagcttcgatcaactacgcggacaggtaccaaaacaaatgttctcgtcacgtgggcatgaatctgatgctgtttccctgcagacaatgcgagagaatgaatcaaaattcaaatatctgcttcactcacggacagaaagactgtttagagtgctttcccgtgtcagaatctcaacctgtttctgtcgtcaaaaaggcgtatcagaaactgtgctacattcatcatatcatgggaaaggtgccagacgcttgcactgcctgcgatctggtcaatgtggatttggatgactgcatctctgaacaataaatgatttaaatcaggtatggctgccgatggttatcttccagattggctcgaggacactctctctgaaggaataagacagtggtggaagctcaaacctggcccaccaccaccaaagcccgcagagcggcataaggacgacagcaggggtcttgtgcttcctgggtacaagtacctcggacccttcaacggactcgacaagggagagccggtcaacgaggcagacgccgcggccctcgagcacgacaaggcctacgaccggcagctcgacagcggagacaacccgtacctcaagtacaaccacgccgacgcggagtttcaggagcgtcttaaagaagatacgtcttttgggggcaacctcggacgagcagtcttccaggcgaaaaagagggttcttgaacctctgggcctggttgaggaacctgttaagacggctccgggaaaaaagaggccggtagagcactctcctgcggagccagactcctcctcgggaaccggaaaagcgggccagcagcctgcaagaaaaagactgaatttcggtcagactggagacgcagactccgtacctgacccccagcctctcagacagccaccagcagcccccacaagtttgggatctactacaatggctacaggcagtggcgcaccaatggcagacaataacgagggtgccgatggagtgggtaattcctcaggaaattggcattgcgattcccaatggctgggcgacagagtcatcaccaccagcacccgaacctgggccctgcccacctacaacaaccacctttacaagcaaatctccagccaatcaggagcctcaaacgacaaccactactttggctacagcaccccctgggggtattttgacttcaacagattccactgccacttttcaccacgtgactggcaaagactcatcaacaacaactggggattccgacccaagagactcaacttcaagctctttaacattcaagtcaaagaggtcacgcagaatgacggtacgacgacgattgccaataaccttaccagcacggttcaggtgtttactgactcggagtaccagctcccgtacgtcctcggctcggcgcatcaaggatgcctcccgccgtttccagcggacgtcttcatggtcccacagtatggatacctcaccctgaacaacgggagtcaggcggtaggacgctcttccttttactgcctggagtactttccttctcagatgctgcgtactggaaacaactttcagttcagctacacttttgaagacgtgcctttccacagcagctacgctcacagccagagtttggatcggctgatgaatcctctgatcgaccagtacctgtattatctaaacagaacacaaacagctagtggaactcagcagtctcggctactgtttagccaagctggacccacaagcatgtctcttcaagctaaaaactggctgcctggaccgtgttatcgccagcagcgtttgtcaaagcaggcaaacgacaacaacaacagcaactttccctggactggagctaccaagtactacctcaatggcagagactctttggtgaacccgggcccggccatggccagccacaaggacgatgaagaaaagtttttccccatgcatggaaccctaatatttggtaaagaaggaacaaatgctaccaacgcggaattggaaaatgtcatgattacagatgaagaggaaatcaggaccaccaatcccgtggctacagagcagtacggatatgtgtcaaataatttgcaaaactcaaatactgctgcaagtactgaaactgtgaatcaccaaggagcattacctggtatggtgtggcaggatcgagacgtgtacctgcagggacccatttgggccaagattcctcacaccgatggacactttcatccttctccactgatgggaggttttggactcaaacacccgcctcctcagattatgatcaaaaacactcccgttccagccaatcctcccacaaacttcagttctgccaagtttgcttccttcatcacacagtattccacgggacaggtcagcgtggagatcgagtgggagctgcagaaggagaacagcaaacgctggaatcccgaaattcagtacacttccaactacaacaaatctgttaatgtggactttactgtggacactaatggtgtgtattcagagcctcgccccattggcaccagatacctgactcgtaatctgtaattgcttgttaatcaataaaccgtttaattcgtttcagttgaactttggtctctgcgaagggcgaattcgcggccgctaaatcaatcg

SEQ ID NO: 302 - protein, 734 aa, Artificial Sequence
  source: /note="Description of Artificial Sequence: Synthetic polypeptide"
MAADGYLPDWLEDTLSEGIRQWWKLKPGPPPPKPAERHKDDSRGLVLPGYKYLGPFNGLDKGEPVNEADAAALEHDKAYDRQLDSGDNPYLKYNHADAEFQERLKEDTSFGGNLGRAVFQAKKRVLEPLGLVEEPVKTAPGKKRPVEHSPAEPDSSSGTGKAGQQPARKRLNFGQTGDADSVPDPQPLGQPPAAPTSLGSTTMATGSGAPMADNNEGADGVGNSSGNWHCDSQWLGDRVITTSTRTWALPTYNNHLYKQISSQSGASNDNHYFGYSTPWGYFDFNRFHCRFSPRDWQRLINNNWGFRPKRLNFKLFNIQVKEVTQNDGTTTIANNLTSTVQVFTDSEYQLPYVLGSAHQGCLPPFPADVFMVPQYGYLTLNNGSQAVGRSSFYCLEYFPSQMLRTGNNFQFSYTFEDVPFHSSYAHSQGLDRLMNPLIDQYLYYLNRTQTASGTQQSRLLFSQAGPTSMSLQAKNWLPGPCYRQQRLSKQANDNNNSNFPWTGATKYHLNGGDSLVNPGPAMASHKDDEEKFFPMHGTLIFGKEGTNATNAELENVMITDEEEIRTTNPVATEQYGYVSNNLQNSNTAASTETVNHQGALPGMVWQDRDVYLRGPIWAKIPHADGHFHPSPLMGGFGLKHPPPQIMIKNTPVPANPPTNFSSAKFASFITQYSTGQVSVEIEWELQKENSKRWNPEIQYTSNYNKSVNVDFTVDTNGVYSEPRPIGTRYLTRNL

SEQ ID NO: 303 - DNA, 3157 bp, Artificial Sequence
  source: /note="Description of Artificial Sequence: Synthetic polynucleotide"
ctcactaagggactagtcctgcaggtttaaacgaattcgcccttgctgcgtcaactggaccaatgagaactttcccttcaacgactgtgtcgacaagatggtgatttggtgggaggaggggaagatgaccgccaaggtcgtggagtcggccaaagccactctcggaggaagcaaggtgcgcgtggaccagaaacgcaagtcctcggcccagatagatccgactcccgtgatcgtcacctccaacaccaacatgtgcgccgtgattgacgggaactcaacgaccttcgaacaccagcagccgttgcaagaccgaatgttcaaatttgaactcacccgccgtctggatcatgacttcgggaaggtcaccaagcaggaagtcaaagactttttccggtgggcaaaggatcacgtggttgaggtggagcatgaattctacgtcaaaaagggtggagccaagaaaagacccgcccctagtgacgcagatataagtgagcccaaacgggtgcgcgagtcagttgcgcagccatcgacgtcagacgcggaagcttcgatcaactacgcggacaggtaccaaaacaaatgttctcgtcacgtgggcatgaatctgatgctgtttccctgcagacaatgcgagagaatgaatcaaaattcaaatatctgcttcactcacggacagaaagactgtttagagtgctttcccgtgtcagaatctcaacctgtttctgtcgtcaaaaaggcgtatcagaaactgtgctacattcatcatatcatgggaaaggtgccagacgcttgcactgcctgcgatctggtcaatgtggatttggatgactgcatctctgaacaataaatgatttaaatcaggtatggctgccgatggttatcttccagattggctcgaggacactctctctgaaggaataagacagtggtggaagctcaaacctggcccaccaccaccaaagcccgcagagcggcataaggacgacagcaggggtcttgtgcttcctgggtacaagtacctcggacccttcaacggactcgacaagggagagccggtcaacgaggcagacgccgcggctctcgagcacgacaaggcctacgaccggcagctcgacagcggagacaacccgtacctcaagtacaaccacgccgacgcggagtttcaggagcgtcttaaagaagatacgtcttttgggggcaacctcggacgagcagtcttccaggcgaaaaagagggttcttgaacctctgggcctggttgaggaacctgttaagacggctccgggaaaaaagaggccggtagagcactctcctgcggagccagactcctcctcgggaaccggaaaagcgggccagcagcctgcaagaaaaagactgaatttcggtcagactggagacgcagactccgtacctgacccccagcctctcggacagccaccagcagcccccacaagtttgggatctactacaatggctacaggcagtggcgcaccaatggcagacaataacgagggtgccgatggagtgggtaattcctcaggaaattggcattgcgattcccaatggctgggcgacagagtcatcaccaccagcacccgaacctgggccctgcccacctacaacaaccacctttacaagcaaatctccagccaatcaggagcctcaaacgacaaccactactttggctacagcaccccctgggggtattttgacttcaacagattccactgccgcttttcaccacgtgactggcaaagactcatcaacaacaactggggattccgacccaagagactcaacttcaagctctttaacattcaagtcaaagaggtcacgcagaatgacggtacgacgacgattgccaataaccttaccagcacggttcaggtgtttactgactcggagtaccagctcccgtacgtcctcggctcggcgcatcaaggatgcctcccgccgtttccagcggacgtcttcatggtcccacagtatggatacctcaccctgaacaacgggagtcaggcggtaggacgctcttccttttactgcctggagtactttccttctcagatgctgcgtactggaaacaactttcagttcagctacacttttgaagacgtgcctttccacagcagctacgctcacagccagggtttggatcggctgatgaatcctctgatcgaccagtacctgtattatctaaacagaacacaaacagctagtggaactcagcagtctcggctactgtttagccaagctggacccacaagcatgtctcttcaagctaaaaactggctgcctggaccgtgttatcgccagcagcgtttgtcaaagcaggcaaacgacaacaacaacagcaactttccctggactggagctaccaagtaccacctcaatggcggagactctttggtgaacccgggcccggccatggccagccacaaggacgatgaagaaaagtttttccccatgcatggaaccctaatatttggtaaagaaggaacaaatgctaccaacgcggaattggaaaatgtcatgattacagatgaagaggaaatcaggaccaccaatcccgtggctacagagcagtacggatatgtgtcaaataatttgcaaaactcaaatactgctgcaagtactgaaactgtgaatcaccaaggagcattacctggtatggtgtggcaggatcgagacgtgtacctgcggggacccatttgggccaagattcctcacgccgatggacactttcatccttctccactgatgggaggttttggactcaaacacccgcctcctcagattatgatcaaaaacactcccgttccagccaatcctcccacaaacttcagttctgccaagtttgcttccttcatcacacagtattccacgggacaggtcagcgtggagatcgagtgggagctgcagaaggagaacagcaaacgctggaatcccgaaattcagtacacttccaactacaacaaatctgttaatgtggactttactgtggacactaatggtgtgtattcagagcctcgccccattggcaccagatacctgactcgtaatctgtaattgcttgttaatcaataaaccgtttaattcgtttcagttgaactttggtctctgcgaagggcgaattcgcggccgctaaattcaattcg

SEQ ID NO: 304 - protein, 734 aa, Artificial Sequence
  source: /note="Description of Artificial Sequence: Synthetic polypeptide"
MAADGYLPDWLEDTLSEGIRQWWKLKPGPPPPKPAERHKDDSRGLVLPGYKYLGPFNGLDKGEPVNEADAAALEHDKAYDRQLDSGDNPYLKYNHADAEFQERLKEDTSFGGNLGRAVFQAKKRVLEPLGLVEEPVKTAPGKKRPVEHSPAEPDSSSGTGKAGQQPARKRLNFGQTGDADSVPDPQPLGQPPAAPTSLGSTTMATGSGAPMADNNEGADGVGNSSGNWHCDSQWLGDRVITTSTRTWALPTYNNHLYKQISSQSGASNDNHYFGYSTPWGYFDFNRFHCHFSPRDWQRLINNNWGFRPKRLNFKLFNIQVKEVTQNDGTTTIANNLTSTVQVFTDSEYQLPYVLGSAHQGCLPPFPADVFMVPQYGYLTLNNGSQAVGRSSFYCLECFPSQMLRTGNNFQFSYTFEDVPFHSSYAHSQSLDRLMNPLIDQYLYYLNRTQTASGTQQSRLLFSQAGPTSMSLQAKNWLPGPCYRQQRLSKQANDNNNSNFPWTGATKYHLNGRDSLVNPGPAMASHKDDEEKFFPMHGTLIFGKEGTNATNAELENVMITDEEEIRTTNPVATEQYGYVSNNLQNSNTAASTETVNHQGALPGMVWQDRDVYLQGPIWAKIPHTDGHFHPSPLMGGFGLKHPPPQIMIKNTPVPANPPTNFSSAKFASFITQYSTGQVSVEIEWELQKENSKRWNPEIQYTSNYNKSVNVDFTVDTNGVYSEPRPIGTRYLTRNL

SEQ ID NO: 305 - DNA, 2208 bp, Artificial Sequence
  source: /note="Description of Artificial Sequence: Synthetic polynucleotide"
atggctgccgatggttatcttccagattggctcgaggacactctctctgaaggaataagacagtggtggaagctcaaacctggcccaccaccaccaaagcccgcagagcggcataaggacgacagcaggggtcttgtgcttcctggatacaagtacctcggacccttcaacggactcgacaagggagagccggtcaacgaggcagacgccgcggccctcgagcacgacaaggcctacgaccggcagctcgacagcggagacaacccgtacctcaagtacaaccacgccgacgcggagtttcaggagcgccttaaagaagatacgtcttttgggggcaacctcggacgagcagtcttccaggcgaaaaagagggttcttgaacctctgggcctggttgaggaacctgttaagacggctccgggaaaaaagaggccggtagagcactctcctgtggagccagactcctcctcgggaaccggaaaagcgggcaaccagcctgcaagaaaaagattgaatttcggtcagactggagacgcagactccgtacctgacccccagcctctcggacagccaccagcatccccctctggtctgggaactaatacgatggctacaggcagtggcgcaccaatggcagacaataacgagggcgccgacggagtgggtaattcctcgggaaattggcattgcgattccacatggatgggcgacagagtcgtcaccaccagcacccgcacctgggccctgcccacctacaacaaccacctctacaagcagatttccagccaatcaggagccagcaacgacaaccactactttggctacagcaccccttgggggtattttgacttcaacagattccactgccacttttcgccacgcgactggcagagactcatcaacaacaactggggattccggcccaaaagactcaacttcaagctgtttaacattcaagtcaaggaggtcacgcagaatgacggtacgacgacgattgccaataaccttaccagcacggttcaggtgtttactgacttggagtaccagctcccgtacgtcctcggctcggcgcatcaaggatgcctcccgccgttcccagcagacgtcttcatggtgccacagtatggatacctcaccctgaacaacgggagtcaggcggtaggacgctcttccttttactgcctggagtactttccttctcagatgcttcgcaccggaaacaactttaccttcagctacacttttgaagacgttcctttccacagcagctacgctcacagtcaaagtctggaccgtctcatgaatcctctcatcgaccagtacctgtattacttgagcagaacaaacactccaagcggaaccactacgcagtccaggcttcagttttctcaggccggagcgagtgacattcgggaccagtctaggaactggcttcctggaccctgttaccgccagcagcgagtatcaaagacagctgcggataacaacaacagtgaatactcgtggactggagctaccaagtaccacctcaatggcagagactctctggtgaatccgggcccggccatggccagccacaaggacgatgaagaaaagttttttcctcaaagcggggttctcatctttgggaagcaaggctcagagaaaacaaatgtggacattgaaaaggtcatgattacagacgaagaggaaatcaggaccaccaatcccgtggctacggagcagtatggttctgtatctaccaacctccagagcggcaacacacaagcagctacctcagatgtcaacacacaaggcgttcttccaggcatggtctggcaggacagagacgtgtacctgcaggggcccatctgggcaaaaattccacacacggacggacattttcacccctctcccctcatgggcggatttggacttaaacaccctcctccacagattctcattaagaataccccggtacctgcgaatccttcgaccaccttcagcgcggcaaagtttgcttccttcatcacacagtattccacggggcaggtcagcgtggagatcgagtgggagctgcagaaggagaacagcaaacgctggaatcccgaaattcagtacacttccaactacaacaaatctgttaatgtggactttactgtggacactaatggggtgtattcagagcctcgccctattggcaccagatacctgactcgtaatctgtaa

SEQ ID NO: 306 - DNA, 3159 bp, Artificial Sequence
  source: /note="Description of Artificial Sequence: Synthetic polynucleotide"
gattgatttagcggccgcgaattcgcccttgctgcgtcaactggaccaatgagaactttcccttcaacgattgcgtcgacaagatggtgatctggtgggaggagggaaagatgaccgccaaggtcgtggagtcggccaaagccattctcggaggaagcaaggtgcgtgtggaccaaaagtgcaagtcttcggcccagatcgacccgactcccgtgatcgtcacctccaacaccaacatgtgcgccgtgattgatggaaactcaacgaccttcgagcaccagcagccgttgcaagaccggatgttcaaatttgaacttacccgccgtctggatcatgactttggaaaggtcaccaagcaggaagtgaaagactttttccggtgggcaaaggatcacgtggttgaggtggagcatgagttctacgtcaaaaagggtggagccaaaaaaagacccgcccccagtgacgcagatataagtgagcccaaacgggcgcgcgagtcagttgcgcagccatcgacgtcagacgcggaagcttcgatcaactacgcggacaggtaccaaaacaaatgttctcgtcacgtgggcatgaatctgatgctgtttccctgcagacaatgcgagagaatgaatcagaattcaaatatctgcttcactcacggacagaaagactgtccatagtgctttcccgtgtcagaatctcaacccgtttctgtcgtcaaaaaggcgtatcagaaactgtgctacattcatcacatcatgggaaaggtgccagacgcttgcactgcttgcgacctggtcaatgtggatttggatgactgcatctctgaacaataaatgatttaaatcaggtatggctgccgatggttatcttccagattggctcgaggacactctctctgaaggaataagacagtggtggaagctcaaacctggcccaccaccaccaaagcccgcagagcggcataaggacgacagcaggggtcttgtgcttcctggatacaagtacctcggacccttcaacggactcgacaagggagagccggtcaacgaggcagacgccgcggccctcgagcacgacaaggcctacgaccggcagctcgacagcggagacaacccgtacctcaagtacaaccacgccgacgcggagtttcaggagcgccttaaagaagatacgtcttttgggggcaacctcggacgagcagtcttccaggcgaaaaagagggttcttgaacctctgggcctggttgaggaacctgttaagacggctccgggaaaaaagaggccggtagagcactctcctgtggagccagactcctcctcgggaaccggaaaagcgggcaaccagcctgcaagaaaaagattgaatttcggtcagactggagacgcagactccgtacctgacccccagcctctcggacagccaccagcatccccctctggtctgggaactaatacgatggctacaggcagtggcgcaccaatggcagacaataacgagggcgccgacggagtgggtaattcctcgggaaattggcattgcgattccacatggatgggcgacagagtcgtcaccaccagcacccgcacctgggccctgcccacctacaacaaccacctctacaagcagatttccagccaatcaggagccagcaacgacaaccactactttggctacagcaccccttgggggtattttgacttcaacagattccactgccacttttcgccacgcgactggcagagactcatcaacaacaactggggattccggcccaaaagactcaacttcaagctgtttaacattcaagtcaaggaggtcacgcagaatgacggtacgacgacgattgccaataaccttaccagcacggttcaggtgtttactgacttggagtaccagctcccgtacgtcctcggctcggcgcatcaaggatgcctcccgccgttcccagcagacgtcttcatggtgccacagtatggatacctcaccctgaacaacgggagtcaggcggtaggacgctcttccttttactgcctggagtactttccttctcagatgcttcgcaccggaaacaactttaccttcagctacacttttgaagacgttcctttccacagcagctacgctcacagtcaaagtctggaccgtctcatgaatcctctcatcgaccagtacctgtattacttgagcagaacaaacactccaagcggaaccactacgcagtccaggcttcagttttctcaggccggagcgagtgacattcgggaccagtctaggaactggcttcctggaccctgttaccgccagcagcgagtatcaaagacagctgcggataacaacaacagtgaatactcgtggactggagctaccaagtaccacctcaatggcagagactctctggtgaatccgggcccggccatggccagccacaaggacgatgaagaaaagttttttcctcaaagcggggttctcatctttgggaagcaaggctcagagaaaacaaatgtggacattgaaaaggtcatgattacagacgaagaggaaatcaggaccaccaatcccgtggctacggagcagtatggttctgtatctaccaacctccagagcggcaacacacaagcagctacctcagatgtcaacacacaaggcgttcttccaggcatggtctggcaggacagagacgtgtacctgcaggggcccatctgggcaaaaattccacacacggacggacattttcacccctctcccctcatgggcggatttggacttaaacaccctcctccacagattctcattaagaataccccggtacctgcgaatccttcgaccaccttcagcgcggcaaagtttgcttccttcatcacacagtattccacggggcaggtcagcgtggagatcgagtgggagctgcagaaggagaacagcaaacgctggaatcccgaaattcagtacacttccaactacaacaaatctgttaatgtggactttactgtggacactaatggggtgtattcagagcctcgccctattggcaccagatacctgactcgtaatctgtaattgcttgttaatcaataaaccgtttaattcgtttcagttgaactttggtctctgcgaagggcgaattcgtttaaacctgcaggactagtccctttagtgagg

SEQ ID NO: 307 - protein, 735 aa, Artificial Sequence
  source: /note="Description of Artificial Sequence: Synthetic polypeptide"
MAADGYLPDWLEDTLSEGIRQWWKLKPGPPPPKPAERHKDDSRGLVLPGYKYLGPFNGLDKGEPVNEADAAALEHDKAYDRQLDSGDNPYLKYNHADAEFQERLKEDTSFGGNLGRAVFQAKKRVLEPLGLVEEPVKTAPGKKRPVEHSPVEPDSSSGTGKAGNQPARKRLNFGQTGDADSVPDPQPLGQPPASPSGLGTNTMATGSGAPMADNNEGADGVGNSSGNWHCDSTWMGDRVVTTSTRTWALPTYNNHLYKQISSQSGASNDNHYFGYSTPWGYFDFNRFHCHFSPRDWQRLINNNWGFRPKRLNFKLFNIQVKEVTQNDGTTTIANNLTSTVQVFTDLEYQLPYVLGSAHQGCLPPFPADVFMVPQYGYLTLNNGSQAVGRSSFYCLEYFPSQMLRTGNNFTFSYTFEDVPFHSSYAHSQSLDRLMNPLIDQYLYYLSRTNTPSGTTTQSRLQFSQAGASDIRDQSRNWLPGPCYRQQRVSKTAADNNNSEYSWTGATKYHLNGRDSLVNPGPAMASHKDDEEKFFPQSGVLIFGKQGSEKTNVDIEKVMITDEEEIRTTNPVATEQYGSVSTNLQSGNTQAATSDVNTQGVLPGMVWQDRDVYLQGPIWAKIPHTDGHFHPSPLMGGFGLKHPPPQILIKNTPVPANPSTTFSAAKFASFITQYSTGQVSVEIEWELQKENSKRWNPEIQYTSNYNKSVNVDFTVDTNGVYSEPRPIGTRYLTRNL

SEQ ID NO: 308 - DNA, 2205 bp, Artificial Sequence
  source: /note="Description of Artificial Sequence: Synthetic polynucleotide"
atggctgccgatggttatcttccagattggctcgaggacactctctctgaaggaataagacagtggtggaagctcaaacctggcccaccaccaaagcccgcagagcggcataaggacgacagcaggggtcttgtgcttcctggatacaagtacctcggacccttcaacggactcgacaagggagagccggtcaacgaggcagacgccgcggccctcgagcacgacaaggcctacgaccggcagctcgacagcggagacaacccgtacctcaagtacaaccacgccgacgcggagtttcaggagcgccttaaagaagatacgtcttttgggggcaacctcggacgagcagtcttccaggcgaaaaagagggttcttgaacctctgggcctggttgaggaacctgttaagacggctccgggaaaaaagaggcccgtagagcactctcctgtggagccagactcctcctcgggaaccggaaaagcgggcaaccagcctgcaagaaaaagattgaatttcggtcagactggagacgcagactccgtacctgacccccagcctctcggacagccaccagcagccccctctggtctgggaactaatacgatggctacaggcagtggcgcaccaatggcagacaataacgagggcgccgacggagtgggtaattcctcgggagattggcattgcgattccacatggatgggcgacagagtcatcaccaccagcacccgcacctgggccctgcccacctacaacaaccacctctacaagcagatttccagccaatcaggagccagcaatgacaaccactactttggctacagcaccccttgggggtattttgacttcaacagattccactgccacttttcgccacgcgactggcagagactcatcaacaacaactggggattccggcccaaaagactcaacctcaagctgtttaacattcaagtcaaggaggtcacgcagaatgacggtacgacgacgattgccaataaccttaccagcacggttcaggtgtttactgacttggagtaccagctcccgtacgtcctcggctcggcgcatcaaggatgcctcccgccgttcccagcagacgtcttcatggtgccacagtatggatacctcaccctgaacaacgggagtcaggcggtaggacgctcttccttttactgcctggagtactttccttctcagatgcttcgtaccggaaacaactttaccttcagctacacttttgaagacgttcctttccacagcagctacgctcacagtcaaagtctggaccgtctcatgaatcctctcatcgaccagtacctgtattacttgagcagaacaaacactccaagcggaaccactacgcagtccaggcttcagttttctcaggccggagcgagtgacattcgggaccagtctaggaactggcttcctggaccctgttaccgccagcagcgagtatcaaagacagctgcggataacaacaacggtgaatactcgtggactggagctaccaagtaccacctcaatggcagagactctctggtgaatccgggcccggccatggccagccacaaggacgatgaagaaaagttttttcctcaaagcggggttctcatctttgggaagcaaggctcagagaaaacaaatgtggacattgaaaaggtcatgattacagacgaagaggaaatcaggaccaccaatcccgtggctacggagcagtatggttctgtatctaccaacctccagagcggcaacacacgagcagctacctcagatgtcaacacacaaggcgttcttccaggcatggtctggcaggacagagacgtgtacctgcaggggcccatctgggcaaaaattccacacacggacggacattttcacccctctcccctcatgggcggatttggacttaaacaccctcctccacagattctcattaagaataccccggtacctgcgaatccttcgaccaccttcagcgcggcaaagtttgcttccttcatcacacagtattccacggggcaggtcagcgtggagatcgagtgggagctgcagaaggagaacagcaaacgctggaatcccgaaattcagtacacttccaactacaacaaatctgttaatgtggactttactgtggacactaatggggtgtattcagagcctcgccctattggcaccagatacctgactcgtaatctgtaa

SEQ ID NO: 309 - DNA, 3156 bp, Artificial Sequence
  source: /note="Description of Artificial Sequence: Synthetic polynucleotide"
cgattgaatttagcggccgcgaattcgcccttgctgcgtcaacggaccaatgagaactttcccttcaacgattgcgtcgacaagatggtgatctggtgggaggagggaaagatgaccgccaaggtcgtggagtcggccaaagccattctcggaggaagcaaggtgcgtgtggaccaaaagtgcaagtcttcggcccagatcgacccgactcccgtgatcgtcacctccaacaccaacatgtgcgccgtgattgatggaaactcaacgaccttcgagcaccagcagccgttgcaagaccggatgttcaaatttgaacttacccgccgtctggatcatgactttggaaaggtcaccaagcaggaagtgaaagactttttccggtgggcaaaggatcacgtggttgaggtggagcatgagttctacgtcaaaaagggtggagccaaaaaaagacccgcccccagtgacgcagatataagtgagcccaaacgggcgcgcgagtcagttgcgcagccatcgacgtcagacgcggaagcttcgatcaactacgcggacaggtaccaaaacaaatgttctcgtcacgtgggcatgaatctgatgctgtttccctgcagacaatgcgagcgaatgaatcagaattcaaatatctgcttcactcacggacagaaagactgtttagagtgctttcccgtgtcagaatctcaacccgtttctgtcgtcaaaaaggcgtatcagaaactgtgctacattcatcacatcatgggaaaggtgccagacgcttgcactgcttgcgacctggtcaatgtggatttggatgactgcatctctgaacaataaatgatttaaatcaggtatggctgccgatggttatcttccagattggctcgaggacactctctctgaaggaataagacagtggtggaagctcaaacctggcccaccaccaaagcccgcagagcggcataaggacgacagcaggggtcttgtgcttcctggatacaagtacctcggacccttcaacggactcgacaagggagagccggtcaacgaggcagacgccgcggccctcgagcacgacaaggcctacgaccggcagctcgacagcggagacaacccgtacctcaagtacaaccacgccgacgcggagtttcaggagcgccttaaagaagatacgtcttttgggggcaacctcggacgagcagtcttccaggcgaaaaagagggttcttgaacctctgggcctggttgaggaacctgttaagacggctccgggaaaaaagaggcccgtagagcactctcctgtggagccagactcctcctcgggaaccggaaaagcgggcaaccagcctgcaagaaaaagattgaatttcggtcagactggagacgcagactccgtacctgacccccagcctctcggacagccaccagcagccccctctggtctgggaactaatacgatggctacaggcagtggcgcaccaatggcagacaataacgagggcgccgacggagtgggtaattcctcgggagattggcattgcgattccacatggatgggcgacagagtcatcaccaccagcacccgcacctgggccctgcccacctacaacaaccacctctacaagcagatttccagccaatcaggagccagcaatgacaaccactactttggctacagcaccccttgggggtattttgacttcaacagattccactgccacttttcgccacgcgactggcagagactcatcaacaacaactggggattccggcccaaaagactcaacctcaagctgtttaacattcaagtcaaggaggtcacgcagaatgacggtacgacgacgattgccaataaccttaccagcacggttcaggtgtttactgacttggagtaccagctcccgtacgtcctcggctcggcgcatcaaggatgcctcccgccgttcccagcagacgtcttcatggtgccacagtatggatacctcaccctgaacaacgggagtcaggcggtaggacgctcttccttttactgcctggagtactttccttctcagatgcttcgtaccggaaacaactttaccttcagctacacttttgaagacgttcctttccacagcagctacgctcacagtcaaagtctggaccgtctcatgaatcctctcatcgaccagtacctgtattacttgagcagaacaaacactccaagcggaaccactacgcagtccaggcttcagttttctcaggccggagcgagtgacattcgggaccagtctaggaactggcttcctggaccctgttaccgccagcagcgagtatcaaagacagctgcggataacaacaacggtgaatactcgtggactggagctaccaagtaccacctcaatggcagagactctctggtgaatccgggcccggccatggccagccacaaggacgatgaagaaaagttttttcctcaaagcggggttctcatctttgggaagcaaggctcagagaaaacaaatgtggacattgaaaaggtcatgattacagacgaagaggaaatcaggaccaccaatcccgtggctacggagcagtatggttctgtatctaccaacctccagagcggcaacacacgagcagctacctcagatgtcaacacacaaggcgttcttccaggcatggtctggcaggacagagacgtgtacctgcaggggcccatctgggcaaaaattccacacacggacggacattttcacccctctcccctcatgggcggatttggacttaaacaccctcctccacagattctcattaagaataccccggtacctgcgaatccttcgaccaccttcagcgcggcaaagtttgcttccttcatcacacagtattccacggggcaggtcagcgtggagatcgagtgggagctgcagaaggagaacagcaaacgctggaatcccgaaattcagtacacttccaactacaacaaatctgttaatgtggactttactgtggacactaatggggtgtattcagagcctcgccctattggcaccagatacctgactcgtaatctgtaattgcttgttaatcaataaaccgtttaattcgtttcagttgaactttggtctctgcgaagggcgaattcgtttaaacctgcaggactagtccctttagtgag

SEQ ID NO: 310 - protein, 734 aa, Artificial Sequence
  source: /note="Description of Artificial Sequence: Synthetic polypeptide"
MAADGYLPDWLEDTLSEGIRQWWKLKPGPPPKPAERHKDDSRGLVLPGYKYLGPFNGLDKGEPVNEADAAALEHDKAYDRQLDSGDNPYLKYNHADAEFQERLKEDTSFGGNLGRAVFQAKKRVLEPLGLVEEPVKTAPGKKRPVEHSPVEPDSSSGTGKAGNQPARKRLNFGQTGDADSVPDPQPLGQPPAAPSGLGTNTMATGSGAPMADNNEGADGVGNSSGDWHCDSTWMGDRVITTSTRTWALPTYNNHLYKQISSQSGASNDNHYFGYSTPWGYFDFNRFHCHFSPRDWQRLINNNWGFRPKRLNLKLFNIQVKEVTQNDGTTTIANNLTSTVQVFTDLEYQLPYVLGSAHQGCLPPFPADVFMVPQYGYLTLNNGSQAVGRSSFYCLEYFPSQMLRTGNNFTFSYTFEDVPFHSSYAHSQSLDRLMNPLIDQYLYYLSRTNTPSGTTTQSRLQFSQAGASDIRDQSRNWLPGPCYRQQRVSKTAADNNNGEYSWTGATKYHLNGRDSLVNPGPAMASHKDDEEKFFPQSGVLIFGKQGSEKTNVDIEKVMITDEEEIRTTNPVATEQYGSVSTNLQSGNTRAATSDVNTQGVLPGMVWQDRDVYLQGPIWAKIPHTDGHFHPSPLMGGFGLKHPPPQILIKNTPVPANPSTTFSAAKFASFITQYSTGQVSVEIEWELQKENSKRWNPEIQYTSNYNKSVNVDFTVDTNGVYSEPRPIGTRYLTRNL

SEQ ID NO: 311 - DNA, 2208 bp, Artificial Sequence
  source: /note="Description of Artificial Sequence: Synthetic polynucleotide"
atggctgccgatggttatcttccagattggctcgaggacactctctctgaaggaataagacagtggtggaagctcaaacctggcccaccaccaccaaagcccgcagagcggcataaggacgacagcaggggtcttgtgcttcctgggtacaagtacctcggacccttcaacggactcgacaagggagagccggtcaacgaggcagacgccgcggccctcgagcacgacaaggcctacgaccggcagctcgacagcggagacaacccgtacctcaagtacgaccacgccgacgcggagtttcaggagcgccttaaagaagatacgtcttttgggggcaacctcggacgagcagtcttccaggcaaaaaagagggttcttgaacctctgggcctggttgaggagcctgttaagacggctccgggaaaaaagaggccggtagagcactctcctgtggagccagactcctcctcgggaaccggaaaagcgggcaaccagcctgcaagaaagagattgaatttcggtcagactggagacgcagactccgtacctgacccccagcctctcggacagccaccagcagccccctctggtctgggaactaatacgatggctacaggcagtggcgcaccaatggcagacaataacgatggcgccgacggagtgggtaattcctcgggaaattggcattgcgattccacatggatgggcgacagagtcatcaccaccagcacccgaacctgggctctgcccacctacaacaaccatctgtacaagcagatttccagccaatcaggagccagcaacgacaaccactactttggctacagcaccccttgggggtattttgacttcaacagattccactgccacttttcaccacgtgactggcaaagactcatcaacaacaactggggattccggcccaagagactcaacttcaagctctttaacattcaagtcagagaggtcacgcagaatgatggtacgacgacgattgccaataaccttaccagcacggttcaggtgtttactgactcggagtaccagctcccgtacgtcctcggctcggcgcatcaaggatgcctcccgccgttcccagcagacgtcttcatggtgccacagtatggatacctcaccctgaacaacgggagtcaggcagtaggacgctcttcattttactgcctggagtacttcccttctcagatgctgcgtaccggaaacaactttaccttcagctacacctttgaggatgttcctttccacagcagctacgctcacagccagagtttggaccgtctcatgaatcctctcatcgaccagtacctgtattacttgagcagaacaaacactccaagcggaaccaccacgcagtccaggcttcagttttctcaggccggagcgagtgacattcgggatcagtctaggaactggcttcctggaccctgttaccgccagcagcgagtatcaaagacatctgcggacaacaacaacagtgaatactcgtggattggagctaccaagtaccacctcaatggcagagactctctggtgaatccgggcccggcaatggccagccacaaggacgatgaagaaaagttttttcctcagagcggggttctcatctttggaaaacaaggatcagagaaaacaaatgtggacattgaaaaggtcatgattacagacgaagaggaaatcagaaccaccaatcccgtggccacggagcagtatggttctgtatctaccaacctccagagcggcaacacacaagcatctactgcagatgtcaacacacaaggcgttcttccaggcatggtctggcaggacagagacgtgtacctgcaggggcctatctgggcaaagattccgcacacggacggacattttcacccctctcccctcatgggcggattcggacttaaacaccctcctccacagattctcatcaaaaacaccccggtacctgcgaatccttcgaccaccttcagtgcggcaaagtttgcttccttcatcacacagtattccacggggcgggtcagcgtggagatcgagtgggagctacagaaggagaacagcaaacgctggaatcccgagatccagtacacttccaactacaacaaatctgttaatgtggactttactgtggacactaatggtgtgtattcagagcctcgccccattggcaccagatacctgactcgtaatctgtaa

SEQ ID NO: 312 - protein, 735 aa, Artificial Sequence
  source: /note="Description of Artificial Sequence: Synthetic polypeptide"
MAADGYLPDWLEDTLSEGIRQWWKLKPGPPPPKPAERHKDDSRGLVLPGYKYLGPFNGLDKGEPVNEADAAALEHDKAYDRQLDSGDNPYLKYDHADAEFQERLKEDTSFGGNLGRAVFQAKKRVLEPLGLVEEPVKTAPGKKRPVEHSPVEPDSSSGTGKAGNQPARKRLNFGQTGDADSVPDPQPLGQPPAAPSGLGTNTMATGSGAPMADNNDGADGVGNSSGNWHCDSTWMGDRVITTSTRTWALPTYNNHLYKQISSQSGASNDNHYFGYSTPWGYFDFNRFHCHFSPRDWQRLINNNWGFRPKRLNFKLFNIQVREVTQNDGTTTIANNLTSTVQVFTDSEYQLPYVLGSAHQGCLPPFPADVFMVPQYGYLTLNNGSQAVGRSSFYCLEYFPSQMLRTGNNFTFSYTFEDVPFHSSYAHSQSLDRLMNPLIDQYLYYLSRTNTPSGTTTQSRLQFSQAGASDIRDQSRNWLPGPCYRQQRVSKTSADNNNSEYSWIGATKYHLNGRDSLVNPGPAMASHKDDEEKFFPQSGVLIFGKQGSEKTNVDIEKVMITDEEEIRTTNPVATEQYGSVSTNLQSGNTQASTADVNTQGVLPGMVWQDRDVYLQGPIWAKIPHTDGHFHPSPLMGGFGLKHPPPQILIKNTPVPANPSTTFSAAKFASFITQYSTGRVSVEIEWELQKENSKRWNPEIQYTSNYNKSVNVDFTVDTNGVYSEPRPIGTRYLTRNL

SEQ ID NO: 313 - DNA, 2217 bp, Artificial Sequence
  source: /note="Description of Artificial Sequence: Synthetic polynucleotide"
atggctgccgatggttatcttccagattggctcgaggacaacctctctgagggcattcgcgagtggtgggacttgaaacctggagccccgaaacccaaagccaaccagcaaaagcaggacgacggccggggtctggtgcttcctggctacaagtacctcggacccttcaacggactcgacaagggggagcccgtcaacgcggcggacgcagcggccctcgagcacgacaaggcctacgaccagcagctcaaagcgggtgacaatccgtacctgcggtataaccacgccgacgccgagtttcaggagcgtctgcaagaagatacgtcttttgggggcaacctcgggcgagcagtcttccaggccaagaagcgggttctcgaacctctcggtctggttgaggaaggcgctaagacggctcctggaaagaagagaccggtagagccatcaccccagcgttctccagactcctctacgggcatcggcaagacaggccagcagcccgcgaaaaagagactcaactttgggcagactggcgactcagagtcagtgcccgaccctcaaccaatcggagaaccccccgcaggcccctctggtctgggatctggtacaatggctgcaggcggtggcgctccaatggcagacaataacgaaggcgccgacggagtgggtagttcctcaggaaattggcattgcgattccgcatggctgggcgacagagtcatcaccaccagcacccgaccctgggccctccccacctacaacaaccacctctacaagcaaatctccaacgggacatcgggaggaagcaccaacgacaacacctacttcggctacagcaccccctgggggtattttgactttaacagattccactgccacttctcaccacgtgactggcagcgactcatcaacaacaactggggattccggcccaagagactcaacttcaagctcttcaacatccaggtcaaggaggtcacgcagaatgaaggcaccaagaccatcgccaataaccttaccagcacgattcaggtctttacggactcggaataccagctcccgtacgtcctcggctctgcgcaccagggctgcccgcctccgttcccggcggacgtcttcatgattcctcagtacgggtacctgactctgaacaacggcagtcaggccgtgggccgttcctccttctactgcctggagtactttccttctcaaatgcggagaacgggcaacaactttgagttcagctaccagtttgaggacgtgccttttcacagcagctacgcgcatagccaaagcctggaccggctgatgaaccccctcatcgaccagtacctgtactacctgtctcggactcagtccacgggaggtaccgcaggaactcagcagttgctattttctcaggccgggcctaataacatgtcggctcaggccaaaaactggctacccgggccctgctaccggcagcaacgcgtctccacgacactgtcgcaaaataacaacagcaactttgcttggaccggtgccaccaagtatcatctgaatggcagagactctctggtaaatcccggtgtcgctatggcaacgcacaaggacgacgaagagcgattttttccatccagcggagtcttgatgtttgggaaacagggagctggaaaagacaacgtggactatagcagcgttatgctaaccagtgaggaagaaatcaaaaccaccaacccagtggccacagaacagtacggcgtggtggccgataacctgcaacagcaaaacgccgctcctattgtaggggccgtcaacagtcaaggagccttacctggcatggtctggcagaaccgggacgtgtacctgcagggtcctatctgggccaagattcctcacacggacggcaactttcatccttcgccgctgatgggaggctttggactgaaacacccgcctcctcagatcctgattaagaatacacctgttcccgcggatcctccaactaccttcagtcaagccaagctggcgtcgttcatcacgcagtacagcaccggacaggtcagcgtggaaattgaatgggagctgcagaaagagaacagcaagcgctggaacccagagattcagtatacttccaactactacaaatctacaaatgtggactttgctgtcaatactgagggtacttattcagagcctcgccccattggcacccgttacctcacccgtaacctgtaa

SEQ ID NO: 314 - protein, 738 aa, Artificial Sequence
  source: /note="Description of Artificial Sequence: Synthetic polypeptide"
MAADGYLPDWLEDNLSEGIREWWDLKPGAPKPKANQQKQDDGRGLVLPGYKYLGPFNGLDKGEPVNAADAAALEHDKAYDQQLKAGDNPYLRYNHADAEFQERLQEDTSFGGNLGRAVFQAKKRVLEPLGLVEEGAKTAPGKKRPVEPSPQRSPDSSTGIGKTGQQPAKKRLNFGQTGDSESVPDPQPIGEPPAGPSGLGSGTMAAGGGAPMADNNEGADGVGSSSGNWHCDSAWLGDRVITTSTRPWALPTYNNHLYKQISNGTSGGSTNDNTYFGYSTPWGYFDFNRFHCHFSPRDWQRLINNNWGFRPKRLNFKLFNIQVKEVTQNEGTKTIANNLTSTIQVFTDSEYQLPYVLGSAHQGCPPPFPADVFMIPQYGYLTLNNGSQAVGRSSFYCLEYFPSQMRRTGNNFEFSYQFEDVPFHSSYAHSQSLDRLMNPLIDQYLYYLSRTQSTGGTAGTQQLLFSQAGPNNMSAQAKNWLPGPCYRQQRVSTTLSQNNNSNFAWTGATKYHLNGRDSLVNPGVAMATHKDDEERFFPSSGVLMFGKQGAGKDNVDYSSVMLTSEEEIKTTNPVATEQYGVVADNLQQQNAAPIVGAVNSQGALPGMVWQNRDVYLQGPIWAKIPHTDGNFHPSPLMGGFGLKHPPPQILIKNTPVPADPPTTFSQAKLASFITQYSTGQVSVEIEWELQKENSKRWNPEIQYTSNYYKSTNVDFAVNTEGTYSEPRPIGTRYLTRNL

SEQ ID NO: 315 - protein, 735 aa, Artificial Sequence
  source: /note="Description of Artificial Sequence: Synthetic polypeptide"
MAADGYLPDWLEDTLSEGIRQWWKLKPGPPPPKPAERHKDDSRGLVLPGYKYLGPFNGLDKGEPVNEADAAALEHDKAYDRQLDSGDNPYLKYNHADAEFQERLKEDTSFGGNLGRAVFQAKKRVLEPLGLVEEPVKTAPGKKRPVEHSPVEPDSSSGTGKAGQQPARKRLNFGQTGDADSVPDPQPLGQPPAAPSGLGSTTMATGSGAPMADNNEGADGVGNSSGNWHCDSQWLGDRVITTSTRTWALPTYNNHLYKQISSQSGASNDNHYFGYSTPWGYFDFNRFHCHFSPRDWQRLINNNWGFRPKRLNFKLFNIQVKEVTQNDGTTTIANNLTSTVQVFTDSEYQLPYVLGSAHQGCLPPFPADVFMVPQYGYLTLNNGSQAVGRSSFYCLEYFPSQMLRTGNNFQFSYTFEDVPFHSSYAHSQSLDRLMNPLVDQYLYYLNKTQTNSGTLQQSRLLFSQAGPTNMSLQAKNWLPGPCYRQQRLSKQANDNNNSNFPWTAATKYHLNGRDSLVNPGPAMASHKDDEEKFFPMHGTLIFGKQGTNANDADLENVMITDEEEIRTTNPVATEQYGTVSNNLQNSNTGPTTGTVNHQGALPGMVWQDRDVYLQGPIWAKIPHTDGHFHPSPLMGGFGLKHPPPQIMIKNTPVPANPPTNFSSAKFASFITQYSTGQVSVEIEWELQKENSKRWNPEIQYTSNYNKSVNVDFTVDTNGVYSEPRPIGTRYLTRNL

SEQ ID NO: 316 - DNA, 3158 bp, Artificial Sequence
  source: /note="Description of Artificial Sequence: Synthetic polynucleotide"
gattgaatttagcggccgcgaattcgcccttgctgcgtcaactggaccaatgagaactttcctttcaatgattgcgtcgacaagatggtgatctggtgggaggagggaaagatgaccgccaaggtcgtggagtcggccaaagccattctcggaggaagcaaggtgcgcgcggaccagaaatgcaagtcctcggcccagatagacccgactcccgtgattgtcacctccaacaccaacatgtgcgccgtgattgacgggaactcaacgaccttcgaacaccagcagccgttgcaagaccggatgttcaaatttgaactcacccgccgtctggatcatgactttgggaaggtcaccaagcaggaagtcaaagactttttccggtgggcaaaggatcacgtggttgaggtggagcatgaattctacgtcaaaaagggtggagctaagaaaagacccgcccccagtgacgcagatataagtgagcccaaacgggcgcgcgagtcagttgcgcagccatcgacgtcagacgcggaagcttcgatcaactacgcgggcaggtaccaaaacaaatgttctcgtcacgtgggcatgaatctgatgctgtttccctgcagacaatgcgagagaatgaatcagaattcaaatatctgcttcactcacggacagaaagactgtttagagtgctttcccgtgtcagaatctcaacccgtttctgtcgtcaaaaaggcgtatcagaaactttgctacattcatcatatcatgggaaaggtgccagacgcttgcactgcctgcgatctggtcaatgtggatttggatgactgcatctctgaacaataaatgatttaaatcaggtatggctgccgatggttatcttccagattggctcgaggacactctctctgaaggaataagacagtggtggaagctcaaacctggcccaccaccaccaaagcccgcagagcggcataaggacgacagcaggggtcttgtgcttcctgggtacaagtacctcggacccttcaacggactcgacaagggggagccggtcaacgaggcagacgccgcggccctcgagcacgacaaggcctacgaccggcagctcgacagcggagacaacccgtacctcaagtacaaccacgccgacgcggagtttcaggagcgccttaaagaagatacgtcttttgggggcaacctcggacgagcagtcttccaggcaaaaaagagggttcttgaacctctgggcctggttgaggaacctgttaaaacggctccgggaaaaaagaggccggtagagcactctcctgtggagccagactcctcctcgggaaccggaaaagcgggccagcagcctgcaagaaaaagattgaatttcggtcagactggagacgcagactccgtacctgacccccagcctctcggacagccaccagcagccccctctggtctgggatctactacaatggctacaggcagtggcgcaccaatggcagacaataacgagggtgccgatggagtgggtaattcctcgggaaattggcattgcgattcccaatggctgggcgacagagtcatcaccaccagcacccgcacctgggccctgcccacctacaacaaccacctctacaagcaaatctccagccaatcaggagcctcaaacgacaaccactactttggctacagcaccccctgggggtattttgacttcaacagattccactgccacttttcaccacgtgactggcaaagactcatcaacaacaactggggattccgacccaagagactcaacttcaagctctttaacattcaagtcaaagaggtcacgcagaatgacggtacgacgacgattgccaataaccttaccagcacggttcaggtgtttactgactcggagtaccagctcccgtacgtcctcggctcggcgcatcaaggatgcctcccgccgtttccagcggacgtcttcatggtcccacagtatggatacctcaccctgaacaacgggagtcaggcagtaggacgctcttcattttactgcctggagtactttccttctcagatgctgcgtaccggaaacaactttcaattcagctacacttttgaagacgtgcctttccacagcagctacgctcacagccagagtctggatcggctgatgaatcctctggtcgaccagtacctgtattatctgaacaagacacaaacaaatagtggaactcttcagcagtctcggctactgtttagccaagctggacccaccaacatgtctcttcaagctaaaaactggctgcctggaccttgctacagacagcagcgtctgtcaaagcaggcaaacgacaacaacaacagcaactttccctggactgcagctacaaagtatcatctaaatggccgggactcgttggttaatccaggaccagctatggccagtcacaaggatgacgaagaaaagtttttccccatgcatggaacccttatatttggtaaacaaggaacaaatgccaacgacgcggatttggaaaatgtcatgattacagatgaagaagaaatcaggaccaccaatcccgtggctacggagcagtacggaactgtatcaaataatttgcaaaactcaaacactggtccaactactggaactgtcaatcaccaaggagcgttacctggtatggtgtggcaggatcgagacgtgtacctgcagggacccatttgggccaagattcctcacaccgatggacactttcatccttctccactgatgggaggttttggactcaaacacccacctcctcaaatcatgatcaaaaacactcccgttccagccaatcctcccacaaacttcagttctgccaagtttgcttctttcatcacacagtattccacggggcaggtcagcgtggagatcgagtgggagctgcagaaggagaacagcaaacgctggaatcccgaaattcagtacacttccaactacaacaaatctgttaatgtggactttactgtggacactaatggtgtgtattcagagcctcgccccattggcaccagatacctgactcgtaatctgtaattgcttgttaatcaataaaccgtttaattcgtttcagttgaactttggtctctgcgaagggcgaattcgtttaaacctgcaggactagtccctttagtga

SEQ ID NO: 317 - protein, 735 aa, Artificial Sequence
  source: /note="Description of Artificial Sequence: Synthetic polypeptide"
MAADGYLPDWLEDTLSEGIRQWWKLKPGPPPPKPAERHKDDSRGLVLPGYKYLGPFNGLDKGEPVNEADAAALEHDKAYDRQLDSGDNPYLKYNHADAEFQERLKEDTSFGGNLGRAVFQAKKRVLEPLGLVEEPVKTAPGKKRPVEHPPVEPDSSSGTGKAGQQPARKRLNFGQTGDADSVPDPQPLGQPPAAPSGLGSTTMATGSGAPMADNNEGADGVGNSSGNWHCDSQWLGDRVITTSTRTWALPTYNNHLYKQISSQSGASNDNHYFGYSTPWGYFDFNRFHCHFSPRDWQRLINNNWGFRPKRLNFKLFNIQVKEVTQNDGTTTIANNLTSTVQVFTDSEYQLPYVLGSAHQGCLPPFPADVFMVPQYGYLTLNNGSQAVGRSSFYCLEYFPSQMLRTGNNFQFSYTFEDVPFHSSYAHSQSLDRLMNPLIDQYLYYLNKTQTNSGTLQQSRLLFSQAGPTNMSLQAKNRLPGPCYRQQRLSKQANDNNNSNFPWTAATKYHLNGRDSLVNPGPAMASHKDDEEKFFPMHGTLIFGKQGTNANDADLENVMITDEEEIRTTNPVATEQYGTVSNNLQNSNTGPTTGTVNHQGALPGMVWQDRDVYLQGPIWAKIPHTDGHFHPSPLVGGFGLKHPPPQIMIKNTPVPANPPTNFSSAKFASFITQYSTGQVSVEIEWELQKENSKRWNPEIQYTSNYNKSVNVDFTVDTNGVYSEPRPIGTRYLTRNL

SEQ ID NO: 318 - DNA, 3159 bp, Artificial Sequence
  source: /note="Description of Artificial Sequence: Synthetic polynucleotide"
gattgaatttagcggccgcgaattcgcccttgctgcgtcaactggaccaatgagaactttcctttcaatgattgcgtcgacaagatggtgatctggtgggaggagggaaagatgaccgccaaggtcgtggagtcggccaaagccattctcggaggaagcaaggtgcgcgtggaccagaaatgcaagtcctcggcccagatagacccgactcccgtgattgtcacctccaacaccgacatgtgcgccgtgattgacgggaactcaacgaccttcgaacaccagcagccgttgcaagaccggatgttcaaatttgaactcacccgccgtctggatcatgactttgggaaggtcaccaagcaggaagtcaaagactttttccggtgggcaaaggatcacgtggttgaggtggagcatgaattctacgtcaaaaagggtggagctaagaaaagacccgcccccagtgacgcagatataagtgagcccaaacgggcgcgcgagtcagttgcgcagccatcgacgtcagacgcggaagcttcgatcaactacgcggacaggtaccaaaacaaatgttctcgtcacgtgggcatgaatctgatgctgtttccctgcagacaatgcgagagaatgaatcagaattcaaatatctgcttcactcacggacagaaagactgtttagagtgctttcccgtgtcagaatctcaacccgtttctgtcgtcaaaaaggcgtatcagaaactttgctacattcatcatatcatgggaaaggtgccagacgcttgcactgcctgcgatctggtcaatgtggatttggatgactgcatctctgaacaataaatgatttaaatcaggtatggctgccgatggttatcttccagattggctcgaggacactctctctgaaggaataagacagtggtggaagctcaaacctggcccaccaccaccaaagcccgcagagcggcataaggacgacagcaggggtcttgtgcttcctgggtacaagtacctcggacccttcaacggactcgacaagggggagccggtcaacgaggcagacgccgcggccctcgagcacgacaaggcctacgaccggcagctcgacagcggagacaacccgtacctcaagtacaaccacgccgacgcggagtttcaggagcgccttaaagaagatacgtcttttgggggcaacctcggacgagcagtcttccaggcaaaaaagagggttcttgaacctctgggcctggttgaggaacctgttaaaacggctccgggaaaaaagaggccggtagagcaccctcctgtggagccagactcctcctcgggaaccggaaaagcgggccagcagcctgcaagaaaaagattgaatttcggtcagactggagacgcagactccgtacctgacccccagcctctcggacagccaccagcagccccctctggtctgggatctactacaatggctacaggcagtggcgcaccaatggcagacaataacgagggtgccgatggagtgggtaattcctcgggaaattggcattgcgattcccaatggctgggcgacagagtcatcaccaccagcacccgcacctgggccctgcccacctacaacaaccacctctacaagcaaatctccagccaatcaggagcctcaaacgacaaccactactttggctacagcaccccctgggggtattttgacttcaacagattccactgccacttttcaccacgtgactggcaaagactcatcaacaacaactggggattccgacccaagagactcaacttcaagctctttaacattcaagtcaaagaggtcacgcagaatgacggtacgacgacgattgccaataaccttaccagcacggttcaggtgtttactgactcggagtaccagctcccgtacgtcctcggctcggcgcatcaaggatgcctcccgccgtttccagcggacgtcttcatggtcccacagtatggatacctcaccctgaacaacgggagtcaggcagtaggacgctcttcattttactgcctggagtactttccttctcagatgctgcgtaccggaaacaactttcagttcagctacacttttgaagacgtgcctttccacagcagctacgctcacagccagagtctggatcggctgatgaatcctctgatcgaccagtacctgtattatctgaacaagacacaaacaaatagtggaactcttcagcagtctcggctactgtttagccaagctggacccaccaacatgtctcttcaagctaaaaaccggctgcctggaccttgctacagacagcagcgtctgtcaaagcaggcaaacgacaacaacaacagcaactttccctggaccgcagctacaaagtatcatctaaatggccgggactcgttggttaatccaggaccagctatggccagtcacaaggatgacgaagaaaagtttttccccatgcatggaacccttatatttggtaaacaaggaacaaatgccaacgacgcggatttggaaaatgtcatgattacagatgaagaagaaatcaggaccaccaatcccgtggctacggagcagtacggaactgtatcaaataatttgcaaaactcaaacactggtccaactactggaactgtcaatcaccaaggagcgttacctggtatggtgtggcaggatcgagacgtgtacctgcagggacccatttgggccaagattcctcacaccgatggacactttcatccttctccactggtgggaggttttggactcaaacacccacctcctcaaatcatgatcaaaaacactcccgttccagccaatcctcccacaaacttcagttctgccaagtttgcttctttcatcacacagtattccacggggcaggtcagcgtggagatcgagtgggagctgcagaaggagaacagcaaacgctggaatcccgaaattcagtacacttccaactacaacaaatctgttaatgtggactttactgtggacactaatggtgtgtattcagagcctcgccccattggcaccagatacctgactcgtaatctgtaattgcttgttaatcaataaaccgtttaattcgtttcagttgaactttggtctctgcgaagggcgaattcgtttaaacctgcaggactagtccctttagtgag

SEQ ID NO: 319 - DNA, 2208 bp, Artificial Sequence
  source: /note="Description of Artificial Sequence: Synthetic polynucleotide"
atggctgccgatggttatcttccagattggctcgaggacactctctctgaaggaataagacagtggtggaagctcaaacctggcccaccaccaccaaagcccgcagagcggcataaggacgacagcaggggtcttgtgcttcctgggtacaagtaccttggacccttcaacggactcgacaagggagagccggtcaacgaggcagacgccgcggccctcgagcacgacaaggcctacgaccggcagctcgacagcggagacaacccgtaccccaagtacaaccacgccgacgcggagttccaggagcgtcttaaagaagatacgtcttttgggggcaacctcggacgagcagtcttccaggcgaaaaagagggttcttgaacctctgggcctggttgaggaacctgttaagacggctccgggaaaaaagaggccggtagagcactctcctgcggagccagactcctcctcgggaaccggaaaagcgggccagcagcctgcaagaaagagattgaatttcggtcagactggagacgcagactccgtacctgacccccagcctctcggacagccaccagcagccccctctggtctgggaactaatacgatggctacaggcagtggcgcaccaatggcagacaataacgagggcgccgacggagtgggtaattcctcgggaaattggcattgcgattccacatggatgggcgacagagtcatcaccaccagcacccgcacctgggctctgcccacctacaacaaccacctctacaagcagatttccagccaatcaggagcctcaaacgacaaccactactttggctacagcaccccttgggggtattttgacttcaacagattccactgccacttttcgccacgtgactggcaaagactcatcaacaacaattggggattccggcccaaaagactcaacttcaagctctttaacattcaagtcaaggaggtcacgcagaatgacggtacgacgacgattgccaataaccttaccagcacggttcaggtgtttactgactcggagtaccagctcccgtacgtcctcggctcggcgcatcaaggatgcctcccgccgttcccagcagacgtcttcatggtgccacagtatggatacctcaccctgaacaacgggagtcaggcagtaggacgctcttcattttactgcctggagtactttccttctcagatgctgcgtaccggaaacaactttaccttcagctacacctttgaggacgttcctttccacagcagctacgcccacagccagagtttggaccgtctcatgaatcctctcatcgaccagtacctgtattacttgagcagaacaaacactccaagcggaaccaccacgcagtcaaggcttcagttttctcaggccggagcaagtgacattcgggaccagtctaggaactggcttcctggaccctgttaccgccagcagcgagtatcaaagacatctgcggataacaacaacagtgaatactcgtggactggagctaccaagtaccaccttaatggaagagactctctggtgaatccgggcccggccatggccagccacaaggacgatgaagaaaagttttttcctcagagcggggttctcatctttggaaaacaagactcgggaaaaactaatgtggacattgaaaaggtcatgattacagacgaagaggaaatcaggaccaccaatcccgtggctacggagcagtatggttctgtatctaccaacctccagagcggcaacacacaagcagctacctcagatgtcaacacacaaggcgttcttccaggcatggtgtggcaggacagagacgtgtacctgcaggggcccatctgggcaaagattccacacacggacggacattttcacccctctcccctcatgggcggattcggacttaaacaccctcccccgcagattctcatcaagaacaccccggtacctgcgaatccttcgactaccttcagtgcggcaaagtttgcttccttcattacacagtactccacggggcaggtcagcgtggagatcgagtgggagctgcagaaggagaacagcaaacgctggaatcccgagattcagtacacttccaactacaacaaatctgttaatgtggactttactgtggacactaatggtgtgtattcagagcctcgccccattggcaccaggtacctgactcgtaatctgtaa

SEQ ID NO: 320 - protein, 735 aa, Artificial Sequence
  source: /note="Description of Artificial Sequence: Synthetic polypeptide"
MAADGYLPDWLEDTLSEGIRQWWKLKPGPPPPKPAERHKDDSRGLVLPGYKYLGPFNGLDKGEPVNEADAAALEHDKAYDRQLDSGDNPYPKYNHADAEFQERLKEDTSFGGNLGRAVFQAKKRVLEPLGLVEEPVKTAPGKKRPVEHSPAEPDSSSGTGKAGQQPARKRLNFGQTGDADSVPDPQPLGQPPAAPSGLGTNTMATGSGAPMADNNEGADGVGNSSGNWHCDSTWMGDRVITTSTRTWALPTYNNHLYKQISSQSGASNDNHYFGYSTPWGYFDFNRFHCHFSPRDWQRLINNNWGFRPKRLNFKLFNIQVKEVTQNDGTTTIANNLTSTVQVFTDSEYQLPYVLGSAHQGCLPPFPADVFMVPQYGYLTLNNGSQAVGRSSFYCLEYFPSQMLRTGNNFTFSYTFEDVPFHSSYAHSQSLDRLMNPLIDQYLYYLSRTNTPSGTTTQSRLQFSQAGASDIRDQSRNWLPGPCYRQQRVSKTSADNNNSEYSWTGATKYHLNGRDSLVNPGPAMASHKDDEEKFFPQSGVLIFGKQDSGKTNVDIEKVMITDEEEIRTTNPVATEQYGSVSTNLQSGNTQAATSDVNTQGVLPGMVWQDRDVYLQGPIWAKIPHTDGHFHPSPLMGGFGLKHPPPQILIKNTPVPANPSTTFSAAKFASFITQYSTGQVSVEIEWELQKENSKRWNPEIQYTSNYNKSVNVDFTVDTNGVYSEPRPIGTRYLTRNL

SEQ ID NO: 321 - DNA, 2208 bp, Artificial Sequence
  source: /note="Description of Artificial Sequence: Synthetic polynucleotide"
atggctgccgatggttatcttccagattggctcgaggacactctctctgaaggaataagacagtggtggaagctcaaacctggcccaccaccaccaaagcccgcagagcggcataaggacgacagcaggggtcttgtgcttcctgggtacaagtaccttggacccttcaacggactcgacaagggagagccggtcaacgaggcagacgccgcggccctcgagcacgacaaggcctacgaccggcagctcgacggcggagacaacccgtacctcaagtacaaccacgccgacgcggagttccaggagcgtcttaaagaagatacgtcttttgggggcaacctcggacgagcagtcttccaggcgaaaaagagggttcttgaacctctgggcctggttgaggaacctgttaagacggctccgggaaaaaagaggccggtagagcactctcttgcggagccagactcctcctcgggaaccggaaaagcgggccagcagcctgcaagaaggagattgaatttcggtcagactggagacgcagactccgtacctgacccccagcctctcggacagccaccagcagccccctctggtctgggaactaatacgatggctacaggcagtggcgcaccaatggcagacaataacgagggcgccgacggagtgggtaattcctcgggaaattggcattgcgattccacatggatgggcgacagagtcatcaccaccagcacccgcacctgggctctgcccacctacaacaaccacctctacaggcagatttccagccaatcaggagcctcaaacgacaaccactactttggctacagcaccccttgggggtattttgacttcaacagattccactgccacttttcgccacgtgactggcaaagactcatcaacaacaattggggatcccggcccaaaagactcaacttcaagctctttaacattcaagtcaaggaggtcacgcagaatgacggtacgacgacgattgccaataaccttaccagcacggttcaggtgtttactgactcggagtaccagctcccgtacgtcctcggctcggcgcatcaaggatgcctcccgccgttcccagcagacgtcttcatggtgccacagtatggatacctcaccctgaacaacgggagtcaggcagtaggacgctcttcattttactgcctggagtactttccttctcagatgctgcgtaccggaaacaactttaccttcagctacacctttgaggacgttcctttccacagcagctacgcccacagccagagtttggaccgtctcatgaatcctctcgtcgaccagtacctgtattacttgagcagaacaaacactccaagcggaaccaccacgcagtcaaggcttcagttttctcaggccggagcaagtgacattcgggaccagtctaggaactggcttcctggaccctgttaccgccagcagcgagtatcaaagacatctgcggataacaacaacagtgaatactcgtggactggagctaccaagtaccaccttaatggaagagactctctggtgaatccgggcccggccatggccagccacaaggacgatgaagaaaagttttttcctcagagcggggttctcatctttggaaaacaagactcgggaaaaactaatgtggacattgaaaaggtcatgattacagacgaagaggaaatcaggaccaccaatcccgtggctacggagcagtatggttctgtatctaccaacctccagagcggcaacacacaagcagctacctcagatgtcaacacacaaggcgttcttccaggcatggtgtggcaggacagagacgtgtacctgcaggggcccatctgggcaaagattccacacacggacggacattttcacccctctcccctcatgggcggattcggacttaaacaccctcccccgcagattctcatcaagaacaccccggtacctgcgaatccttcgactaccttcagtgcggcaaagtttgcttccttcattacacagtactccacggggcaggtcagcgtggagatcgagtgggagctgcagaaggagaacagcaaacgctggaatcccgagattcagtacacttccaactacaacaaatctgttaatgtggactttactgtggacactaatggtgtgtattcagagcctcgccccattggcaccagatacctgactcgtaatctgtaa

SEQ ID NO: 322 - protein, 735 aa, Artificial Sequence
  source: /note="Description of Artificial Sequence: Synthetic polypeptide"
MAADGYLPDWLEDTLSEGIRQWWKLKPGPPPPKPAERHKDDSRGLVLPGYKYLGPFNGLDKGEPVNEADAAALEHDKAYDRQLDGGDNPYLKYNHADAEFQERLKEDTSFGGNLGRAVFQAKKRVLEPLGLVEEPVKTAPGKKRPVEHSLAEPDSSSGTGKAGQQPARRRLNFGQTGDADSVPDPQPLGQPPAAPSGLGTNTMATGSGAPMADNNEGADGVGNSSGNWHCDSTWMGDRVITTSTRTWALPTYNNHLYRQISSQSGASNDNHYFGYSTPWGYFDFNRFHCHFSPRDWQRLINNNWGSRPKRLNFKLFNIQVKEVTQNDGTTTIANNLTSTVQVFTDSEYQLPYVLGSAHQGCLPPFPADVFMVPQYGYLTLNNGSQAVGRSSFYCLEYFPSQMLRTGNNFTFSYTFEDVPFHSSYAHSQSLDRLMNPLVDQYLYYLSRTNTPSGTTTQSRLQFSQAGASDIRDQSRNWLPGPCYRQQRVSKTSADNNNSEYSWTGATKYHLNGRDSLVNPGPAMASHKDDEEKFFPQSGVLIFGKQDSGKTNVDIEKVMITDEEEIRTTNPVATEQYGSVSTNLQSGNTQAATSDVNTQGVLPGMVWQDRDVYLQGPIWAKIPHTDGHFHPSPLMGGFGLKHPPPQILIKNTPVPANPSTTFSAAKFASFITQYSTGQVSVEIEWELQKENSKRWNPEIQYTSNYNKSVNVDFTVDTNGVYSEPRPIGTRYLTRNL

SEQ ID NO: 323 - protein, 738 aa, Artificial Sequence
  source: /note="Description of Artificial Sequence: Synthetic polypeptide"
MAADGYLPDWLEDNLSEGIREWWDLKPGAPKPKANQQKQDDGRGLVLPGYKYLGPFNGLDKGEPVNAADAAALEHDKAYDQQLKAGDNPYLRYNHADAEFQERLQEDTSFGGNLGRAVFQAKKRVLEPLGLVEEAAKTAPGKKRPVEPSPQRSPDSSAGIGKKGQQPAKKRLNFGQTGDSESVPDPQPIGEPPAGPSGLGSGTMAAGGGAPMADNNEGADGVGSSSGNWHCDSTWLGDRVITTSTRTWALPTYNNHLYKQISNGTSGGSTNDNTYFGYSTPWGYFDFNRFHCHFSPRDWQRLINNNWGFRPKRLSFKLFNIQVKEVTQNEGTETIANNLTSTIQVFTDSEYQLPYVLGSAHQGCLPPFPADVFMIPQYGYLTLNNGSQAVGRSSFYCLEYFPSQMLRTGNNFEFSYTFEDVPFHSSCAHSQSSDRLMNPLIDQYLYYLSRTRSTGGTQGTQQLLFSQAGPANMSAQAKNWLPGPCYRQQRVSTTLSQNNNSNFAWTGATKYHLNGRDSLVNPGVAMATHKDDEERFFPSSGVLMFGKQGAGRDNVDYSSVMLTSEEEIKTTNPVATEQYGVVADNLQQTNTGPIVGNVNSQGALPGMVWQNRDVYLQGPIWAKIPHTDGNFHPSPLMGGFGLKHPPPQILIKNTPVPADPPTTFSQAKLASFITQYSTGQVSVEIEWELQKENSKRWNPEIQYTSNYYKSTNVDFAVNTEGTYSEPRPIGTRYLTRNL

SEQ ID NO: 324 - DNA, 2217 bp, Artificial Sequence
  source: /note="Description of Artificial Sequence: Synthetic polynucleotide"
atggctgctgacggttatcttccagattggctcgaggacaacctctctgagggcattcgcgagtggtgggacctgaaacctggagcccccaagcccaaggccaaccagcagaagcaggacgacggccggggtctggtgcttcttggctacaagtacctcggacccttcaacggactcgacaagggggagcccgtcaatgcggcggacgcagcggccctcgagcacgacaaggcctacgaccagcagctcaaagcgggtgacaatccgtacctgcggtataaccacgccgacgccgagtttcaggagcgtctgcaagaagatacgtcttttgggggcaacctcgggcgagcagtcttccaggccaagaagcgggttctcgaacctctcggtctggttgaggaagctgctaagacggctcctggaaagaagagaccggtagaaccgtcacctcagcgttcccccgactcctccacgggcatcggcaagaaaggccagcagcccgctaaaaagagactgaactttggtcagactggcgactcagagtcagtccccgaccctcaaccaatcggagaaccaccagcaggcccctctggtctgggatctggtacaatggctgcaggcggtggcgctccaatggcagacaataacgaaggcgccgacggagtgggtagttcctcaggaaattggcattgcgattccacatggctgggcgacagagtcatcaccaccagcacccgaacctgggccctgcccacctacaacaaccacctctacaagcaaatatccaatgggacatcgggaggaagcaccaacgacaacacctacttcggctacagcaccccctgggggtattttgacttcaacagattccactgccacttctcaccacgtgactggcagcgactcatcaacaacaactggggattccggccaaaaagactcagcttcaagctcttcaacatccaggtcaaggaggtcacgcagaatgaaggcaccaagaccatcgccaataaccttaccagcacgattcaggtatttacggactcggaataccagctgccgtacgtcctcggctccgcgcaccagggctgcctgcctccgttcccggcggacgtcttcatgattccccagtacggctaccttacactgaacaatggaagtcaagccgtaggccgttcctccttctactgcctggaatattttccatctcaaatgctgcgaactggaaacaattttgaattcagctacaccttcgaggacgtgcctttccacagcggctacgcacacagccagagcttggaccgactgatgaatcctctcatcgaccagtacctgtactacttatccagaactcagtccacaggaggaactcaaggtacccagcaattgttattttctcaagctgggcctgcaaacatgtcggctcaggctaagaactggctacctggaccttgctaccggcagcagcgagtctctacgacactgtcgcaaaacaacaacagcaactttgcttggactggtgccaccaaatatcacctgaacggaagagactctttggtaaatcccggtgtcgccatggcaacccacaaggacgacgaggaacgcttcttcccgtcgagtggagtcctgatgtttggaaaacagggtgctggaagagacaatgtggactacagcagcgttatgctaaccagcgaagaagaaattaaaaccactaaccctgtagccacagaacaatacggtgtggtggctgacaacttgcagcaaaccaatacagggcctattgtgggaaatgtcaacagccaaggagccttacctggcatggtctggcagaaccgagacgtgtacctgcagggtcccatctgggccaagattcctcacacggacggcaacttccacccttcaccgctaatgggaggatttggactgaagcacccacctcctcagatcctgatcaagaacacgccggtacctgcggatcctccaacgacgttcagccaggcgaaattggcttccttcattacgcagtacagcaccggacaggtcagcgtggaaatcgagtgggagctgcagaaggagaacagcaaacgctggaacccagagattcagtacacttcaaactactacaaatctacaaatgtggactttgctgtcaatacagagggaacttattctgagcctcgccccattggtactcgttacctcacccgtaatctgtaa

SEQ ID NO: 325 - protein, 738 aa, Artificial Sequence
  source: /note="Description of Artificial Sequence: Synthetic polypeptide"
MAADGYLPDWLEDNLSEGIREWWDLKPGAPKPKANQQKQDDGRGLVLLGYKYLGPFNGLDKGEPVNAADAAALEHDKAYDQQLKAGDNPYLRYNHADAEFQERLQEDTSFGGNLGRAVFQAKKRVLEPLGLVEEAAKTAPGKKRPVEPSPQRSPDSSTGIGKKGQQPAKKRLNFGQTGDSESVPDPQPIGEPPAGPSGLGSGTMAAGGGAPMADNNEGADGVGSSSGNWHCDSTWLGDRVITTSTRTWALPTYNNHLYKQISNGTSGGSTNDNTYFGYSTPWGYFDFNRFHCHFSPRDWQRLINNNWGFRPKRLSFKLFNIQVKEVTQNEGTKTIANNLTSTIQVFTDSEYQLPYVLGSAHQGCLPPFPADVFMIPQYGYLTLNNGSQAVGRSSFYCLEYFPSQMLRTGNNFEFSYTFEDVPFHSGYAHSQSLDRLMNPLIDQYLYYLSRTQSTGGTQGTQQLLFSQAGPANMSAQAKNWLPGPCYRQQRVSTTLSQNNNSNFAWTGATKYHLNGRDSLVNPGVAMATHKDDEERFFPSSGVLMFGKQGAGRDNVDYSSVMLTSEEEIKTTNPVATEQYGVVADNLQQTNTGPIVGNVNSQGALPGMVWQNRDVYLQGPIWAKIPHTDGNFHPSPLMGGFGLKHPPPQILIKNTPVPADPPTTFSQAKLASFITQYSTGQVSVEIEWELQKENSKRWNPEIQYTSNYYKSTNVDFAVNTEGTYSEPRPIGTRYLTRNL

SEQ ID NO: 326 - protein, 735 aa, Artificial Sequence
  source: /note="Description of Artificial Sequence: Synthetic polypeptide"
MAADGYLPDWLEDTLSEGIRQWWKLKPGPPPPKPAERHKDDSRGLVLPGYKYLGPFNGLDKGEPVNEADAAALEHDKAYDRQLDSGDNPYLKYNHADAEFQERLKEDTSFGGNLGRAVFQAKKRVLEPLGLVEPPVKTAPGKKRPVEHSPAEPDSSSGTGKAGQQPARKRLNFGQTGDADSVPDPQPLGQPPAAPSGLGSTTMATGSGAPMADNNEGADGVGNSSGNWHCDSQWLGDRVITTSTRTWALPTYNNHLYKQISSQSGASNDNHYFGYSTPWGYFDFNRFHCHFSPRDWQRLINNNWGFRPKRLNFKLFNIQVKEVTQNDGTTTIANNLTSTVQVFTDSEYQLPYVLGSAHQGCLPPFPADVFMVPQYGYLTLNNGSQAVGRSSFYCLEYFPSQMLRTGNNFQFSYTFEDVPFHSSYAHSQSLDRLMNPLIDQYLYYLNKTQSNSGTLQQSRLLFSQAGPTSMSLQAKNWLPGPCYRQQRLSKQANDNNNSNFPWTAATKYHLNGRDSLVNPGPAMASHKDDEEKFFPMHGTLIFGKQGTNANDADLDNVMITDEEEIRTTNPVATEQYGYVSNNLQNSNTGPTTGTVNHQGALPGMVWQDRDVYLQGPIWAKIPHTDGHFHPSPLMGGFGLKHPPPQIMIKNTPVPANPPTNFSSAKFASFITQYSTGQVSVEIEWELQKENSKRWNPEIQYTSNYNKSVNVDFTVDTNGVYSEPRPIGTRYLTRNL

SEQ ID NO: 327 - protein, 735 aa, Artificial Sequence
  source: /note="Description of Artificial Sequence: Synthetic polypeptide"
MAADGYLPDWLEDTLSEGIRQWWKLKPGPPPPKPAERHKDDSRGLVLPGYKYLGPFNGLDKGEPVNEADAAALEHDKAYDRQLDSGDNPYLKYNHADAEFQERLKEDTSFGGNLGRAVFQAKKRVLEPLGLVEGPVKTAPGKKRPVEHSPAEPDSSSGTGKAGQQPARKRLNFGQTGDADSVPDPQPLGQPPAAPSGLGSTTMATGSGAPMADNNEGADGVGNSSGNWHCDSQWLGDRVITTSTRTWALPTYNNHLYKQISSQSGASNDNHYFGYSTPWGYFDFNRFHCHFSPRDWQRLINNNWGFRPKRLNFKLFNIQVKEVTQNDGTTTIANNLTSTVQVFTDSEYQLPYVLGSAHQGCLPPFPADVFMVPQYGYLTLNNGSQAVGRSSFYCLEYFPSQMLRTGNNFQFSYTFEDVPFHSSYAHSQSLDRLMNPLIDQYLYYLNKTQSNSGTLQQSRLLFSQAGPTSMSLQAKNWLPGPCYRQQRLSKQANDNNNSNFPWTAATKYHLNGRDSLVNPGPAMASHKDDEEKFFPMHGTLIFGKQGTNANDADLDNVMITDEEEIRTTNPVATEQYGYVSNNLQNSNTGPTTGTVNHQGALPGMVWQDRDVYLQGPIWAKIPHTDGHFHPSPLMGGFGLKHPPPQIMIKNTPVPANPPTNFSSAKFASFITQYSTGQVSVEIEWELQKENSKRWNPEIQYTSNYNKSVNVDFTVDTNGVYSEPRPIGTRYLTRNL

SEQ ID NO: 328 - DNA, 2208 bp, Artificial Sequence
  source: /note="Description of Artificial Sequence: Synthetic polynucleotide"
atggctgccgatggttatcttccagattggctcgaggacactctctctgaaggaataagacagtggtggaagctcaaacctggcccaccaccaccaaagcccgcagagcggcataaggacgacagcaggggtcttgtgcttcctgggtacaagtacctcggacccttcaacggactcgacaagggggagccggtcaacgaggcagacgccgcggccctcgagcacgacaaggcctacgaccggcagctcgacagcggagacaacccgtacctcaagtacaaccacgccgacgcggagtttcaggagcgtcttaaagaagatacgtcttttgggggcaacctcggacgagcagtcttccaggcgaaaaagagggttcttgaacctctgggcctggttgagggacctgttaagacggctccgggaaaaaagaggccggtagagcactctcctgcggagccagactcctcctcgggaaccggaaaagcgggccagcagcctgcaagaaaaagattgaattttggtcagactggagacgcagactccgtacctgacccccagcctctcggacagccaccagcagccccctctggtttgggatctactacaatggctacaggcagtggcgcaccaatggcagacaataacgagggtgccgatggagtgggtaattcctcaggaaattggcattgcgattcccaatggctgggcgacagagtcatcaccaccagcacccgaacctgggccctgcccacctacaacaaccacctctacaagcaaatctcaagccaatcaggagcctcaaacgacaaccactactttggctacagcaccccttgggggtattttgacttcaacagattccactgccacttttcaccacgtgactggcaaagactcatcaacaacaactggggattccgacccaagagactcaacttcaagctctttaacattcaagtcaaagaggtcacgcagaatgacggtacgacgacgattgccaataaccttaccagcacggttcaggtgtttactgactcggagtaccagctcccgtacgtcctcgggtcggcgcatcaaggatgcctcccgccgtttccagcggacgtcttcatggtcccacagtatggatacctcaccctgaacaacgggagtcaggcggtaggacgctcttccttttactgcctggagtactttccttctcagatgcttcgtactggaaacaactttcagttcagctacacctttgaagacgttcctttccacagcagctacgctcacagccagagtctggatcggctgatgaatcctctgatcgaccagtacctgtattatctgaacaaaacacaatcaaatagtggaactcttcagcagtctcggctactgtttagtcaagctggacccaccagcatgtctcttcaagctaaaaactggctacctggaccttgctacagacagcagcgtctgtcaaagcaggcaaacgacaacaacaacagcaactttccctggactgcggctacaaagtatcacctaaatggccgggactcgttggttaatccaggaccagctatggccagtcacaaagacgatgaagaaaagtttttccccatgcatggaaccctgatatttggtaaacaaggaacaaatgctaacgacgcggatttggacaatgtcatgattacagatgaagaagaaatccgcaccaccaatcccgtggctacggagcagtacggatatgtgtcaaataatttgcaaaactcaaatactggtccaactactggaactgtcaatcaccaaggagcgttacctggcatggtgtggcaggatcgagacgtgtacctgcagggacccatttgggccaagattcctcacaccgatggacactttcatccttctccactgatgggaggttttgggctcaaacacccgcctcctcagatcatgatcaaaaacactcccgttccagccaatcctcccacaaacttcagttctgccaagtttgcttctttcatcacacagtattccacggggcaggtcagcgtggagatcgagtgggagctgcagaaagagaacagcaaacgctggaatcccgaaattcagtacacttccaactacaacaaatctgttaatgtggactttactgtggacactaatggcgtgtattcagagcctcgccccattggcaccagatacctgactcgtaatctgtaa

SEQ ID NO: 329 - DNA, 2211 bp, Artificial Sequence; identical to SEQ ID NO: 10
  source: /note="Description of Artificial Sequence: Synthetic polynucleotide"

SEQ ID NO: 330 - DNA, 2208 bp, Artificial Sequence
  source: /note="Description of Artificial Sequence: Synthetic polynucleotide"
atggctgccgatggttatcttccagattggctcgaggacactctctctgaaggaacaagacagtggtggaagctcaaacctggcccaccaccaccaaagcccgcagagcggcataaggacgacagcaggggtcttgtgcttcctgggtacaagtacctcggacccttcaacggactcgacaagggggagccggtcaacgaggcagacgccgcggccctcgagcacgacaaggcctacgaccggcagctcgacagcggagacaacccgtacctcaagtacaaccacgccgacgcggagtttcaggagcgtcttaaagaagatacgtcttttgggggcaacctcggacgagcagtcttccaggcgaaaaagagggttcttgaacctctgggcctggttgaggaacctgttaagacggctccgggaaaaaagaggccggtagagcactctcctgcggagccagactcctcctcgggaaccggaaaagcgggccagcagcctgcaagaaaaagattgaattttggtcagactggagacgcagactccgtacctgacccccagcctctcggacagccaccagcagccccctctggtttgggatctactacaatggctacaggcagtggcgcaccaatggcagacaataacgagggtgccgatggagtgggtaattcctcaggaaattggcattgcgattcccaatggctgggcgacagagtcatcaccaccagcacccgaacctgggccctgcccacctacaacaaccacctctacaagcaaatctcaagccaatcaggagcctcaaacgacaaccactactttggctacagcaccccttgggggtattttgacttcaacagattccactgccacttttcaccacgtgactggcaaagactcatcaacaacaactggggattccgacccaagagactcaacttcaagctctttaacattcaagtcaaagaggtcacgcagaatgacggtacgacgacgattgccaataaccttaccagcacggttcaggtgtttactgactcggagtaccagctcccgtacgtcctcgggtcggcgcatcaaggatgcctcccgccgtttccagcggacgtcttcatggtcccacagtatggatacctcaccctgaacaacgggagtcaggcggtaggacgctcttccttttactgcctggagtactttccttctcagatgcttcgtactggaaacaactttcagttcagctacacctttgaagacgttcctttccacagcagctacgctcacagccagagtctggatcggctgatgaatcctctgatcgaccagtacctgtattatctgaacaaaacacaatcaaatagtggaactcttcagcagtctcggctactgtttagtcaagctggacccaccagcatgtctcttcaagctaaaaactggctacctggaccttgctacagacagcagcgtctgtcaaagcaggcaaacgacaacaacaacagcaactttccctggactgcggctacaaagtaccacctaaatggccgggactcgttggttaatccaggaccagctatggccagtcacaaagacgatgaagaaaagtttttccccatgcatggaaccctgatatttggtaaacaaggaacaaatgctaacgacgcggatttggacaatgtcatgattacagatgaagaagaaatccgcaccaccaatcccgtggctacggagcagtacggatatgtgtcaaataatttgcaaaactcaaatactggtccaactactggaactgtcaatcaccaaggagcgttacctggcatggtgtggcaggatcgagacgtgtacctgcagggacccatttgggccaagattcctcacaccgatggacactttcatccttctccactgatgggaggttttgggctcaaacacccgcctcctcagatcatgatcaaaaacactcccgttccagccaatcctcccacaaacttcagttctgccaagtttgcttctttcatcacacagtattccacggggcaggtcagcgtggagatcgagtgggagctgcagaaagagaacagcaaacgctggaatcccgaaattcagtacacttccaactacaacaaatctgttaatgtggactttactgtggacactaatggcgtgtattcagagcctcgccccattggcaccagatacctgactcgtaatctgtaa

SEQ ID NO: 331 - DNA, 2217 bp, Artificial Sequence
  source: /note="Description of Artificial Sequence: Synthetic polynucleotide"
atggctgctgacggttatcttccagattggctcgaggacaacctctctgagggcattcgcgagtggtgggacctgaaacctggagcccccaagcccaaggccaaccagcagaagcaggacgacggccggggtctggtgcttcctggctacaagtacctcggacccttcaacggactcgacaagggggagcccgtcaacgcggcggacgcagcggccctcgagcacgacaaggcctacgaccagcagctcaaagcgggtgacaatccgtacctgcggtataaccacgccgacgccgagtttcaggagcgtctgcaagaagatacgtcttttgggggcaacctcgggcgagcagtcttccaggccaagaagcgggttctcgaacctctcggtctggttgaggaagctgctaagacggctcctggaaagaagagaccggtagaaccgtcacctcagcgttcccccgactcctccacgggcatcggcaagaaaggccagcagcccgctaaaaagagactgaactttggtcagactggcgactcagagtcagtccccgaccctcaaccaatcggagaaccacctgcaggcccctctggtctgggatctggtacaatggctgcaggcggtggcgctccaatggcagacaataacgaaggcgccgacggagtgggtagttcctcaggaaattggcattgcgattccacatggctgggcgacagagtcatcaccaccagcacccgaacctgggccctgcccacctacaacaaccacctctacaagcaaatatccaatgggacatcgggagggagcaccaacgacaacacctacttcggctacagcaccccctgggggtattttgacttcaacagattccactgccacttctcaccacgtgactggcagcgactcatcaacaacaactggggattccggccaaaaagactcagcttcaagctcttcaacatccaggtcaaggaggtcacgcagaatgaaggcaccaagaccatcgccaataaccttaccagcacgattcaggtatttacggactcggaataccagctgccgtacgtcctcggctccgcgcaccagggctgcctgcctccgttcccggcggacgtcttcatgattccccagtacggctaccttacactgaacaatggaagtcaagccgtaggccgttcctccttctactgcctggaatattttccatctcaaatgctgcgaactggaaacaattttgaattcagctacaccttcgaggacgtgcctttccacagcagctacgcacacagccagagcttggaccgactgatgaatcctctcatcgaccagtacctgtactacttatccagaactcagtccacaggaggaactcaaggtacccagcaattgttattttctcaagctgggcctgcaaacatgtcggctcaggctaagaactggctacctggaccttgctaccggcagcagcgagtctctacgacactgtcgcaaaacaacaacagcaactttgcttggactggtgccaccaaatatcacctgaacggaagagactctttggtaaatcccggtgtcgccatggcaacccacaaggacgacgaggaacgcttcttcccgtcgagtggagtcctgatgtttggaaaacagggtgctggaagagacaatgtggactacagcagcgttatgctaaccagcgaagaagaaattaaaaccactaaccctgtagccacagaacaatacggtgtggtggctgacaacttgcagcaaaccaatacagggcctattgtgggaaatgtcaacagccaaggagccttacctggcatggtctggcagaaccgagacgtgtacctgcagggtcccatctgggccaagattcctcacacggacggcaactgccacccttcaccgctaatgggaggatttggactgaagcacccacctcctcagatcctgatcaagaacacgccggtacctgcggatcctccaacaacgttcagccaggcgaaattggcttccttcattacgcagtacagcaccggacaggtcagcgtggaaatcgagtgggagctgcagaaggagaacagcaaacgctggaacccagagattcagtacacttcaaactactacaaatctacaaatgtggactttgctgtcaatacagagggaacttattctgagcctcgccccattggtactcgttacctcacccgtaatctgtaa

SEQ ID NO: 332 - protein, 735 aa, Artificial Sequence
  source: /note="Description of Artificial Sequence: Synthetic polypeptide"
MAADGYLPDWLEDTLSEGTRQWWKLKPGPPPPKPAERHKDDSRGLVLPGYKYLGPFNGLDKGEPVNEADAAALEHDKAYDRQLDSGDNPYLKYNHADAEFQERLKEDTSFGGNLGRAVFQAKKRVLEPLGLVEEPVKTAPGKKRPVEHSPAEPDSSSGTGKAGQQPARKRLNFGQTGDADSVPDPQPLGQPPAAPSGLGSTTMATGSGAPMADNNEGADGVGNSSGNWHCDSQWLGDRVITTSTRTWALPTYNNHLYKQISSQSGASNDNHYFGYSTPWGYFDFNRFHCHFSPRDWQRLINNNWGFRPKRLNFKLFNIQVKEVTQNDGTTTIANNLTSTVQVFTDSEYQLPYVLGSAHQGCLPPFPADVFMVPQYGYLTLNNGSQAVGRSSFYCLEYFPSQMLRTGNNFQFSYTFEDVPFHSSYAHSQSLDRLMNPLIDQYLYYLNKTQSNSGTLQQSRLLFSQAGPTSMSLQAKNWLPGPCYRQQRLSKQANDNNNSNFPWTAATKYHLNGRDSLVNPGPAMASHKDDEEKFFPMHGTLIFGKQGTNANDADLDNVMITDEEEIRTTNPVATEQYGYVSNNLQNSNTGPTTGTVNHQGALPGMVWQDRDVYLQGPIWAKIPHTDGHFHPSPLMGGFGLKHPPPQIMIKNTPVPANPPTNFSSAKFASFITQYSTGQVSVEIEWELQKENSKRWNPEIQYTSNYNKSVNVDFTVDTNGVYSEPRPIGTRYLTRNL

SEQ ID NO: 333 - DNA, 2208 bp, Artificial Sequence
  source: /note="Description of Artificial Sequence: Synthetic polynucleotide"
atggctgccgatggttatcttccagattggctcgaggacactctctctgaaggaataagacagtggtggaagctcaaacctggcccaccaccaccaaagcccgcagagcggcatcaggacaacagcaggggtcttgtgcttcctgggtacaagtacctcggaccctccaacggactcgacaaaggagagccggtcaacgaggcagacgccgcggccctcgagcacgacaaggcctacgaccggcagctcgacagcggagacaacccgtacctcaagtacaaccacgccgacgcggagtttcaggagcgtcttaaagaagatacgtcttttgggggcaacctcggacgagcagtcttccaggcgaaaaagagggttcttgaacctctgggcctggttgaggaacctgttaagacggctccgggaaaaaagaggccggtagagcactctcctgtggagccagactcctcctcgggaaccggaaaagcgggccatcagcctgcgagaaagagattgaattttggtcagactggagacgcagactccgtacctgacccccagcctctcggacagccaccagcagcccccacaagtttgggatctactacaatggctacaggcagtggcgcaccaatggcagacaataacgagggtgccgatggagtgggtaattcctcaggaaattggcattgcgattcccaatggctgggcgacagagtcatcaccaccagcacccgaacctgggccctgcccacctacaacaaccacctctacaagcaaatctccagccaatcaggagcctcgaacgacaaccactactttggctgcagcaccccctgggggtattttgacttcaacagattccactgtcacttctccccacgtgattggcaaagactcatcaacaacaactggggattccgacccaagagactcaacttcaagctctttaacattcaagtcaaagaggtcacgcagaatgacggtacgacgacgattgccaataaccttaccagcacggttcaggtgtttactgactcggagtacccgctcccgtacgtcctcggctcggcgcatcaaggatgcctcccgccgtttccagcggacgtcttcatggtcccacagtatggatacctcaccctgaacaacgggagtcaggcggtaggacgctcttccttttactgcctggagtactttccttctcagatgctgcgtaccggaaacaactttaccttcagctacacctttgaggacgttcctttccacagcagctacgctcacagccagagtttggaccggctgatgaatcctctgatcgaccagtatctatattatctgaacaggacacaatcaaatagtggaactcttcagcagtctaggctactgtttagccaagctggacccaccagcatgtctcttcaagctaaaaactggctgcctggaccttgctacagacagcagcgtctttcaaagcaggcaaacgacaacaacaacagcaactttccctggactgcggctacaaagtatcatctaaatggccgggactcgttggttaatccaggaccagctatggccagccacaaagacgatgaagaaaagtttttccccatgcatggaaccctgatatttggtaaacaaggaacaaatgctaacgacgcggatttggagcatgttatgattacagatgaagaagaaatcaggaccaccaatcctgtggctacagagcagtacggaaacgtgtcaaataatttgcaaaactcaaatactggtccaactacagaaaatgtcaatcaccagggagcgttacctggtatggtgtggcaggatcgagacgtgtacctgcagggacccatttgggccaagattcctcacaccgacggacactttcacccttctccactgatgggaggttttggactcaaacacccgcctcctcaaatcatgatcaaaaacactcccgttccagccaatcctcccacaaacttcagttctgccaagtttgcttctttcatcacacagtattccacgggccaggtcagcgtggagattgagtgggagctgcagaaggagaacagcaaacgctggaaccccgagatccagtatacttccaactacaacaaatctgttaatgtggactttactgtggacactaatggtgtgtattcagagccttgccccattggcaccagatacctgactcgtaatctgtaa

SEQ ID NO: 334 - protein, 735 aa, Artificial Sequence
  source: /note="Description of Artificial Sequence: Synthetic polypeptide"
MAADGYLPDWLEDTLSEGIRQWWKLKPGPPPPKPAERHQDNSRGLVLPGYKYLGPSNGLDKGEPVNEADAAALEHDKAYDRQLDSGDNPYLKYNHADAEFQERLKEDTSFGGNLGRAVFQAKKRVLEPLGLVEEPVKTAPGKKRPVEHSPVEPDSSSGTGKAGHQPARKRLNFGQTGDADSVPDPQPLGQPPAAPTSLGSTTMATGSGAPMADNNEGADGVGNSSGNWHCDSQWLGDRVITTSTRTWALPTYNNHLYKQISSQSGASNDNHYFGCSTPWGYFDFNRFHCHFSPRDWQRLINNNWGFRPKRLNFKLFNIQVKEVTQNDGTTTIANNLTSTVQVFTDSEYPLPYVLGSAHQGCLPPFPADVFMVPQYGYLTLNNGSQAVGRSSFYCLEYFPSQMLRTGNNFTFSYTFEDVPFHSSYAHSQSLDRLMNPLIDQYLYYLNRTQSNSGTLQQSRLLFSQAGPTSMSLQAKNWLPGPCYRQQRLSKQANDNNNSNFPWTAATKYHLNGRDSLVNPGPAMASHKDDEEKFFPMHGTLIFGKQGTNANDADLEHVMITDEEEIRTTNPVATEQYGNVSNNLQNSNTGPTTENVNHQGALPGMVWQDRDVYLQGPIWAKIPHTDGHFHPSPLMGGFGLKHPPPQIMIKNTPVPANPPTNFSSAKFASFITQYSTGQVSVEIEWELQKENSKRWNPEIQYTSNYNKSVNVDFTVDTNGVYSEPCPIGTRYLTRNL

SEQ ID NO: 335 - DNA, 2214 bp, Artificial Sequence
  source: /note="Description of Artificial Sequence: Synthetic polynucleotide"
atggctgccgatggttatcttccagattggctcgaggacaaccttagtgaaggaattcgcgagtggtgggctttgaaacctggagcccctcaacccaaggcaaatcaacaacatcaagacaacgctcgaggtcttgtgcttccgggttacaaataccttggacccggcaacggactcgacaagggggagccggtcaacgcagcagacgcggcggccctcgagcacgacaaggcctacgaccagcagctgcaggcgggtgacaatccgtacctgcggtataaccacgccgacgccgagtttcaggagcgtctgcaagaagatacgtcttttgggggcaaccttggcagagcagtcttccaggccaaaaagaggatccttgagcctcttggtctggttgaggaagcagctaaaacggctcctggaaagaagaggcctgtagatcagtctcctcaggaaccggactcatcatctggtgttggcaaatcgggcaaacagcctgccagaaaaagactaaatttcggtcagactggcgactcagagtcagtcccagaccctcaacctctcggagaaccaccagcagcccccacaagtttgggatctaatacaatggcttcaggcggtggcgcaccaatggcagacaataacgagggtgccgatggggtgggtagttcctcgggaaattggcattgcgattcccaatggctgggggacagagtcatcaccaccagcacccgaacctgggccctgcccacctacaacaatcacctctacaagcaaatctccaacgggacatcgggaggagccaccaacgacaacacctacttcggctacagcaccccctgggggtattttgactttaacagattccactgccacttttcaccacgtgactggcagcgactcatcaacaacaactggggattccggcccaagagactcagcttcaagctcttcaacatccaggtcaaggaggtcacgcagaatgaaggcaccaagaccatcgccaataacctcaccagcaccatccaggtgtttacggactcggagtaccagctgccgtacgttctcggctctgcgcaccagggctgcctccctccgttcccggcggacgtgttcatgattccgcaatacggctacctgacgctcaacaatggcagccaagccgtgggacgttcatccttttactgcctggaatatttcccttctcagatgctgagaacgggcaacaactttaccttcagctacacctttgaggaagtgcctttccacagcagctacgcgcacagccagagcttggaccggctgatgaatcctctgattgaccagtacctgtactacttgtctcggactcaaacaacaggaggcacggcaaatacgcagactctgggcttcagccaaggtgggcctaatacaatggccaatcaggcaaagaactggctgccaggaccctgttaccgccaacaacgcgtctcaacgacaaccgggcaaaacaacaatagcaactttgcctggactgctgggaccaaataccatctgaatggaagaaattcattggctaatcctggcatcgctatggcaacacacaaagacgacgaggagcgtttttttcccagtaacgggatcctgatttttggcaaacaaaatgctgccagagacaatgcggattacagcgatgtcatgctcaccagcgaggaagaaatcaaaaccactaaccctgtggctacagaggaatacggtatcgtggcagataacttgcagcagcaaaacacggctcctcaaattggaactgtcaacagccagggggccttacccggtatggtctggcagaaccgggacgtgtacctgcagggtcccatctgggccaagattcctcacacggacggcaacttccacccgtctccgctgatgggcggctttggcctgaaacatcctccgcctcagatcctgatcaagaacacgcctgtacctgcggatcctccgaccaccttcaaccagtcaaagctgaactctttcatcacgcaatacagcaccggacaggtcagcgtggagatcgagtgggagctgcagaaggaaaacagcaagcgctggaacccggagatccagtacacttccaactattacaagtctaataatgttgaatttgctgttaatactgaaggtgtatatagtgaaccccgccccattggcaccagatacctgactcgtaatctgtaa

SEQ ID NO: 336 - protein, 737 aa, Artificial Sequence
  source: /note="Description of Artificial Sequence: Synthetic polypeptide"
MAADGYLPDWLEDNLSEGIREWWALKPGAPQPKANQQHQDNARGLVLPGYKYLGPGNGLDKGEPVNAADAAALEHDKAYDQQLQAGDNPYLRYNHADAEFQERLQEDTSFGGNLGRAVFQAKKRILEPLGLVEEAAKTAPGKKRPVDQSPQEPDSSSGVGKSGKQPARKRLNFGQTGDSESVPDPQPLGEPPAAPTSLGSNTMASGGGAPMADNNEGADGVGSSSGNWHCDSQWLGDRVITTSTRTWALPTYNNHLYKQISNGTSGGATNDNTYFGYSTPWGYFDFNRFHCHFSPRDWQRLINNNWGFRPKRLSFKLFNIQVKEVTQNEGTKTIANNLTSTIQVFTDSEYQLPYVLGSAHQGCLPPFPADVFMIPQYGYLTLNNGSQAVGRSSFYCLEYFPSQMLRTGNNFTFSYTFEEVPFHSSYAHSQSLDRLMNPLIDQYLYYLSRTQTTGGTANTQTLGFSQGGPNTMANQAKNWLPGPCYRQQRVSTTTGQNNNSNFAWTAGTKYHLNGRNSLANPGIAMATHKDDEERFFPSNGILIFGKQNAARDNADYSDVMLTSEEEIKTTNPVATEEYGIVADNLQQQNTAPQIGTVNSQGALPGMVWQNRDVYLQGPIWAKIPHTDGNFHPSPLMGGFGLKHPPPQILIKNTPVPADPPTTFNQSKLNSFITQYSTGQVSVEIEWELQKENSKRWNPEIQYTSNYYKSNNVEFAVNTEGVYSEPRPIGTRYLTRNL

SEQ ID NO: 337 - DNA, 2211 bp, Artificial Sequence
  source: /note="Description of Artificial Sequence: Synthetic polynucleotide"
atggctgccgatggttatcttccagattggctcgaggacaacctctctgagggcattcgcgagtggtgggacttgaaacctggagccccgaagcccaaagccaaccagcaaaagcaggacgacggccggggtctggtgcttcctggctacaagtacctcggacccttcaacggactcgacaagggggagcccgtcaacgcggcggacgcagcggccctcgagcacgacaaggcctacgaccagcagctcaaagcgggtgacaatccgtacctgcggtataaccacgccgacgccgagtttcaggagcgtctgcaagaagatacgtcttttgggggcaacctcgggcgagcagtcttccaggccaagaagcgggttctcgaacctctcggtctggttgaggaaggcgctaagacggctcctggaaagaaacgtccggtagagcagtcgccacaagagccagactcctcctcgggcatcggcaagacaggccagcagcccgctaaaaagagactcaattttggtcagactggcgactcagagtcagtccccgacccacaacctctcggagaacctccagcaacccccgctgctgtgggacctactacaatggcttcaggcggtggcgcaccaatggcagacaataacgaaggcgccgacggagtgggtaatgcctcaggaaattggcattgcgattccacatggctgggcgacagagtcatcaccaccagcacccgaacatgggccttgcccacctataacaaccacctctacaagcaaatctccagtgcttcaacgggggccagcaacgacaaccactacttcggctacagcaccccctgggggtattttgatttcaacagattccactgccatttctcaccacgtgactggcagcgactcatcaacaacaattggggattccggcccaagagactcaacttcaagctcttcaacatccaagtcaaggaggtcacgacgaatgatggcgtcacgaccatcgctaataaccttaccagcacggttcaagtcttctcggactcggagtaccagctgccgtacgttctcggctctgcccaccagggctgcctgcctccgttcccggcggacgtgttcatgattccccagtacggctacctaacactcaacaacggtagtcaggccgtgggacgctcctccttctactgcctggaatactttccttcgcagatgctgagaaccggcaacaacttccagtttacttacaccttcgaggacgtgcctttccacagcagctacgcccacagccagagcttggaccggctgatgaatcctctgattgaccagtacctgtactacttgtctcggactcaaacaacaggaggcacggcaaatacgcagactctgggcttcagccaaggtgggcctaatacaatggccaatcaggcaaagaactggctgccaggaccctgttaccgccaacaacgcgtctcaacgacaaccgggcaaaacaacaatagcaattttacctggactggtgcttcaaaatataacctcaatgggcgtgaatccatcatcaaccctggcactgctatggcctcacacaaagacgacgaagacaagttctttcccatgagcggtgtcatgatttttggaaaagagagcgccggagcttcaaacactgcattggacaatgtcatgattacagacgaagaggaaattaaagccactaaccctgtggccaccgaaagatttgggaccgtggcagtcaatttccagagcagcagcacagaccctgcgaccggagatgtgcatgctatgggagcattacctggcatggtgtggcaagatagagacgtgtacctgcagggtcccatttgggccaaaattcctcacacagatggacactttcacccgtctcctcttatgggcggctttggactcaagaacccgcctcctcagatcctcatcaaaaacacgcctgttcctgcgaatcctccggcggagttttcagctacaaagtttgcttcattcatcacccaatactccacaggacaagtgagtgtggaaattgaatgggagctgcagaaagaaaacagcaagcgctggaatcccgaagtgcagtacacatccaattatgcaaaatctgccaacgttgattttactgtggacaacaatggactttatactgagcctcgccccattggcacccgttacctcacccgtcccctgtaa

SEQ ID NO: 338 - protein, 736 aa, Artificial Sequence
  source: /note="Description of Artificial Sequence: Synthetic polypeptide"
MAADGYLPDWLEDNLSEGIREWWDLKPGAPKPKANQQKQDDGRGLVLPGYKYLGPFNGLDKGEPVNAADAAALEHDKAYDQQLKAGDNPYLRYNHADAEFQERLQEDTSFGGNLGRAVFQAKKRVLEPLGLVEEGAKTAPGKKRPVEQSPQEPDSSSGIGKTGQQPAKKRLNFGQTGDSESVPDPQPLGEPPATPAAVGPTTMASGGGAPMADNNEGADGVGNASGNWHCDSTWLGDRVITTSTRTWALPTYNNHLYKQISSASTGASNDNHYFGYSTPWGYFDFNRFHCHFSPRDWQRLINNNWGFRPKRLNFKLFNIQVKEVTTNDGVTTIANNLTSTVQVFSDSEYQLPYVLGSAHQGCLPPFPADVFMIPQYGYLTLNNGSQAVGRSSFYCLEYFPSQMLRTGNNFQFTYTFEDVPFHSSYAHSQSLDRLMNPLIDQYLYYLSRTQTTGGTANTQTLGFSQGGPNTMANQAKNWLPGPCYRQQRVSTTTGQNNNSNFTWTGASKYNLNGRESIINPGTAMASHKDDEDKFFPMSGVMIFGKESAGASNTALDNVMITDEEEIKATNPVATERFGTVAVNFQSSSTDPATGDVHAMGALPGMVWQDRDVYLQGPIWAKIPHTDGHFHPSPLMGGFGLKNPPPQILIKNTPVPANPPAEFSATKFASFITQYSTGQVSVEIEWELQKENSKRWNPEVQYTSNYAKSANVDFTVDNNGLYTEPRPIGTRYLTRPL

SEQ ID NO: 339 - DNA, 2211 bp, Artificial Sequence
  source: /note="Description of Artificial Sequence: Synthetic polynucleotide"
atggctgctgacggttatcttccagattggctcgaggacaacctttctgaaggcattcgagagtggtgggcgctgcaacctggagcccctaaacccaaggcaaatcaacaacatcaggacaacgctcggggtcttgtgcttccgggttacaaatacctcggacccggcaacggactcgacaagggggaacccgtcaacgcagcggacgcggcagccctcgagcacgacaaggcctacgaccagcagctcaaggccggtgacaacccctacctcaagtacaaccacgccgacgccgagttccaggagcggctcaaagaagatacgtcttttgggggcaacctcgggcgagcagtcttccaggccaaaaagaggcttcttgaacctcttggtctggttgaggaagcggctaagacggctcctggaaagaagaggcctgtagatcagtctcctcaggaaccggactcatcatctggtgttggcaaatcgggcaaacagcctgccagaaaaagactaaatttcggtcagactggcgactcagagtcagtcccagaccctcaacctctcggagaaccaccagcagcccccacaagtttgggatctaatacaatggcttcaggcggtggcgcaccaatggcagacaataacgagggtgccgatggagtgggtaattcctcaggaaattggcattgcgattcccaatggctgggcgacagagtcatcaccaccagcaccagaacctgggccctgcccacttacaacaaccatctctacaagcaaatctccagccaatcaggagcttcaaacgacaaccactactttggctacagcaccccttgggggtattttgactttaacagattccactgccacttctcaccacgtgactggcagcgactcattaacaacaactggggattccggcccaagaaactcagcttcaagctcttcaacatccaagttaaagaggtcacgcagaacgatggcacgacgactattgccaataaccttaccagcacggttcaagtgtttacggactcggagtatcagctcccgtacgtgctcgggtcggcgcaccaaggctgtctcccgccgtttccagcggacgtcttcatggtccctcagtatggatacctcaccctgaacaacggaagtcaagcggtgggacgctcatccttttactgcctggagtacttcccttcgcagatgctaaggactggaaataacttccaattcagctataccttcgaggatgtaccttttcacagcagctacgctcacagccagagtttggatcgcttgatgaatcctcttattgatcagtatctgtactacctgaacagaacgcaaggaacaacctctggaacaaccaaccaatcacggctgctttttagccaggctgggcctcagtctatgtctttgcaggccagaaattggctacctgggccctgctaccggcaacagagactttcaaagactgctaacgacaacaacaacagtaactttccttggacagcggccagcaaatatcatctcaatggccgcgactcgctggtgaatccaggaccagctatggccagtcacaaggacgatgaagaaaaatttttccctatgcacggcaatctaatatttggcaaagaagggacaacggcaagtaacgcagaattagataatgtaatgattacggatgaagaagagattcgtaccaccaatcctgtggcaacagagcagtatggaactgtggcaaataacttgcagagctcaaatacagctcccacgactagaactgtcaatgatcagggggccttacctggcatggtgtggcaagatcgtgacgtgtaccttcaaggacctatctgggcaaagattcctcacacggatggacactttcatccttctcctctgatgggaggctttggactgaaacatccgcctcctcaaatcatgatcaaaaatactccggtaccggcaaatcctccgacgactttcagcccggccaagtttgcttcatttatcactcagtactccactggacaggtcagcgtggaaattgagtgggagctacagaaagaaaacagcaaacgttggaatccagagattcagtacacttccaactacaacaagtctgttaatgtggactttactgtagacactaatggtgtttatagtgaacctcgccccattggcacccgttaccttacccgtcccctgtaa

SEQ ID NO: 340 - protein, 736 aa, Artificial Sequence
  source: /note="Description of Artificial Sequence: Synthetic polypeptide"
MAADGYLPDWLEDNLSEGIREWWALQPGAPKPKANQQHQDNARGLVLPGYKYLGPGNGLDKGEPVNAADAAALEHDKAYDQQLKAGDNPYLKYNHADAEFQERLKEDTSFGGNLGRAVFQAKKRLLEPLGLVEEAAKTAPGKKRPVDQSPQEPDSSSGVGKSGKQPARKRLNFGQTGDSESVPDPQPLGEPPAAPTSLGSNTMASGGGAPMADNNEGADGVGNSSGNWHCDSQWLGDRVITTSTRTWALPTYNNHLYKQISSQSGASNDNHYFGYSTPWGYFDFNRFHCHFSPRDWQRLINNNWGFRPKKLSFKLFNIQVKEVTQNDGTTTIANNLTSTVQVFTDSEYQLPYVLGSAHQGCLPPFPADVFMVPQYGYLTLNNGSQAVGRSSFYCLEYFPSQMLRTGNNFQFSYTFEDVPFHSSYAHSQSLDRLMNPLIDQYLYYLNRTQGTTSGTTNQSRLLFSQAGPQSMSLQARNWLPGPCYRQQRLSKTANDNNNSNFPWTAASKYHLNGRDSLVNPGPAMASHKDDEEKFFPMHGNLIFGKEGTTASNAELDNVMITDEEEIRTTNPVATEQYGTVANNLQSSNTAPTTRTVNDQGALPGMVWQDRDVYLQGPIWAKIPHTDGHFHPSPLMGGFGLKHPPPQIMIKNTPVPANPPTTFSPAKFASFITQYSTGQVSVEIEWELQKENSKRWNPEIQYTSNYNKSVNVDFTVDTNGVYSEPRPIGTRYLTRPL

SEQ ID NO: 341 - DNA, 2211 bp, Artificial Sequence
  source: /note="Description of Artificial Sequence: Synthetic polynucleotide"
atggctgccgatggttatcttccagattggctcgaggacaaccttagtgaaggaattcgcgagtggtgggctttgaaacctggagcccctcaacccaaggcaaatcaacaacatcaagacaacgctcgaggtcttgtgcttccgggttacaaataccttggacccggcaacggactcgacaagggggagccggtcaacgcagcagacgcggcggccctcgagcacgacaaggcctacgaccagcagctcaaggccggagacaacccgtacctcaagtacaaccacgccgacgccgagttccaggagcggctcaaagaagatacgtcttttgggggcaacctcgggcgagcagtcttccaggccaaaaagaggcttcttgaacctcttggtctggttgaggaagcggctaagacggctcctggaaagaagagaccggtagagccatcaccccagcgttctccagactcctctacgggcatcggcaagaaaggccaacagcccgctaaaaagagactcaattttggtcagactggcgactcagagtcagtccccgacccacaacctctcggagaacctccagcaacccccgctgctgtgggacctactacaatggcttcaggcggtggcgcaccaatggcagacaataacgagggtgccgatggagtgggtaattcctcaggaaattggcattgcgattcccaatggctgggcgacagagtcatcaccaccagcaccagaacctgggccctgcccacttacaacaaccatctctacaagcaaatctccagccaatcaggagcttcaaacgacaaccactactttggctacagcaccccttgggggtattttgactttaacagattccactgccacttttcaccacgtgactggcaaagactcatcaacaacaactggggattccgacccaagagactcaacttcaagctcttcaacatccaagtcaaggaggtcacgacgaatgatggcgtcacgaccatcgctaataaccttaccagcacggttcaagtcttctcggactcggagtaccagttgccgtacgtcctcggctctgcgcaccagggctgcctccctccgttcccggcggacgtgttcatgattccgcagtacggctacctaacgctcaacaatggcagccaagccgtgggacgttcatccttttactgcctggaatatttcccttctcagatgctgagaacgggcaacaactttaccttcagctacacttttgaggacgttcctttccacagcagctacgctcacagccagagtctggaccgtctcatgaatcctctcatcgaccagtacctgtattacttgagcagaacaaacactccaagtggaaccaccacgcagtcaaggcttcagttttctcaggccggagcgagtgacattcgggaccagtctaggaactggcttcctggaccctgttaccgccagcagcgcgtttctaaaacaaaaacagacaacaacaacagcaattttacctggactggtgcttcaaaatataaccttaatgggcgtgaatctataatcaaccctggcactgctatggcctcacacaaagacgacgaagacaagttctttcccatgagcggtgtcatgatttttggaaaagagagcgccggagcttcaaacactgcattggacaatgtcatgattacagacgaagaggaaattaaagccactaaccctgtggccaccgaaagatttgggaccgtggcagtcaatttccagagcagcagcacagaccctgcgaccggagatgtgcatgttatgggagccttacctggaatggtgtggcaagacagagacgtatacctgcagggtcctatttgggccaaaattcctcacacggatggacactttcacccgtctcctcttatgggcggctttggactcaagaacccgcctcctcagatcctcatcaaaaacacgcctgttcctgcgaatcctccggcggagttttcagctacaaagtttgcttcattcatcacccaatactccacaggacaagtgagtgtggaaattgaatgggagctgcagaaagaaaacagcaagcgctggaatcccgaagtgcagtacacatccaattatgcaaaatctgccaacgttgattttactgtggacaacaatggactttatactgagcctcgccccattggcacccgttaccttacccgtcccctgtaa

SEQ ID NO: 342 - protein, 736 aa, Artificial Sequence
  source: /note="Description of Artificial Sequence: Synthetic polypeptide"
MAADGYLPDWLEDNLSEGIREWWALKPGAPQPKANQQHQDNARGLVLPGYKYLGPGNGLDKGEPVNAADAAALEHDKAYDQQLKAGDNPYLKYNHADAEFQERLKEDTSFGGNLGRAVFQAKKRLLEPLGLVEEAAKTAPGKKRPVEPSPQRSPDSSTGIGKKGQQPAKKRLNFGQTGDSESVPDPQPLGEPPATPAAVGPTTMASGGGAPMADNNEGADGVGNSSGNWHCDSQWLGDRVITTSTRTWALPTYNNHLYKQISSQSGASNDNHYFGYSTPWGYFDFNRFHCHFSPRDWQRLINNNWGFRPKRLNFKLFNIQVKEVTTNDGVTTIANNLTSTVQVFSDSEYQLPYVLGSAHQGCLPPFPADVFMIPQYGYLTLNNGSQAVGRSSFYCLEYFPSQMLRTGNNFTFSYTFEDVPFHSSYAHSQSLDRLMNPLIDQYLYYLSRTNTPSGTTTQSRLQFSQAGASDIRDQSRNWLPGPCYRQQRVSKTKTDNNNSNFTWTGASKYNLNGRESIINPGTAMASHKDDEDKFFPMSGVMIFGKESAGASNTALDNVMITDEEEIKATNPVATERFGTVAVNFQSSSTDPATGDVHVMGALPGMVWQDRDVYLQGPIWAKIPHTDGHFHPSPLMGGFGLKNPPPQILIKNTPVPANPPAEFSATKFASFITQYSTGQVSVEIEWELQKENSKRWNPEVQYTSNYAKSANVDFTVDNNGLYTEPRPIGTRYLTRPL

SEQ ID NO: 343 - DNA, 2211 bp, Artificial Sequence
  source: /note="Description of Artificial Sequence: Synthetic polynucleotide"
atggctgccgatggttatcttccagattggctcgaggacaacctctctgagggcattcgcgagtggtgggacttgaaacctggagcccctaaacccaaggcaaatcaacaacatcaggacaacgctcgaggtcttgtgcttccgggttacaaataccttggacccggcaacggactcgacaagggggagccggtcaacgcagcagacgcggcggccctcgagcacgacaaggcctacgaccagcagctcaaggccggagacaacccgtacctcaagtacaaccacgccgacgccgagttccaggagcggctcaaagaagatacgtcttttgggggcaacctcgggcgagcagtcttccaggccaaaaagaggcttcttgaacctcttggtctggttgaggaagcggctaagacggctcctggaaagaagagaccggtagagccatcaccccagcgttctccagactcctctacgggcatcggcaagaaaggccaacagcccgctaaaaagagactcaattttggtcagactggcgactcagagtcagtccccgacccacaacctctcggagaacctccagcaacccccgctgctgtgggacctactacaatggcttcaggcggtggcgcaccaatggcagacaataacgagggtgccgatggagtgggtaattcctcaggaaattggcattgcgattcccaatggctgggcgacagagtcatcaccaccagcaccagaacctgggccctgcccacttacaacaaccatctctacaagcaaatctccagccaatcaggagcttcaaacgacaaccactactttggctacagcaccccttgggggtattttgactttaacagattccactgccacttttcaccacgtgactggcaaagactcatcaacaacaactggggattccgacccaagagactcaacttcaagctcttcaacatccaagtcaaggaggtcacgacgaatgatggcgtcacgaccatcgctaataaccttaccagcacggttcaagtcttctcggactcggagtaccagttgccgtacgtcctcggctctgcgcaccagggctgcctccctccgttcccggcggacgtgttcatgattccgcagtacggctacctaacgctcaacaatggcagccaagccgtgggacgttcatccttttactgcctggaatatttcccttctcagatgctgagaacgggcaacaactttaccttcagctacacttttgaggacgttcctttccacagcagctacgctcacagccagagtctggaccgtctcatgaatcccctcatcgaccagtacctgtattacttgagcagaacaaacactccaagtggaaccaccacgcagtcaaggcttcagttttctcaggccggagcgagtgacattcgggaccagtctaggaactggcttcctggaccctgttaccggcagcagcgcgtttctaaaacaaaaacagacaacaacaacagcaactttacctggactggtgcttcaaaatataaccttaatgggcgtgaatctataatcaaccctggcactgctatggcctcacacaaagacgacgaagacaagttctttcccatgagcggtgtcatgatttttggaaaggagagcgccggagcttcaaacactgcattggacaatgtcatgatcacagacgaagaggaaatcaaagccactaaccccgtggccaccgaaagatttgggactgtggcagtcaatctccagagcagcagcacagaccctgcgaccggagatgtgcatgttatgggagccttacctggaatggtgtggcaagacagagacgtgtacctgcagggtcctatttgggccaaaattcctcacacggatggacactttcacccgtctcctctcatgggcggctttggacttaagcacccgcctcctcagatcctcatcaaaaacacgcctgttcctgcgaatcctccggcagagttttcggctacaaagtttgcttcattcatcacccagtattccacaggacaagtgagtgtggaaattgaatgggagctgcagaaagaaaacagcaagcgctggaatcccgaagtgcagtacacatccaattatgcaaaatctgccaacgttgattttactgtggacaacaatggactttatactgagcctcgccccattggcacccgttacctcacccgtcccctgtaa

SEQ ID NO: 344 - protein, 736 aa, Artificial Sequence
  source: /note="Description of Artificial Sequence: Synthetic polypeptide"
MAADGYLPDWLEDNLSEGIREWWDLKPGAPKPKANQQHQDNARGLVLPGYKYLGPGNGLDKGEPVNAADAAALEHDKAYDQQLKAGDNPYLKYNHADAEFQERLKEDTSFGGNLGRAVFQAKKRLLEPLGLVEEAAKTAPGKKRPVEPSPQRSPDSSTGIGKKGQQPAKKRLNFGQTGDSESVPDPQPLGEPPATPAAVGPTTMASGGGAPMADNNEGADGVGNSSGNWHCDSQWLGDRVITTSTRTWALPTYNNHLYKQISSQSGASNDNHYFGYSTPWGYFDFNRFHCHFSPRDWQRLINNNWGFRPKRLNFKLFNIQVKEVTTNDGVTTIANNLTSTVQVFSDSEYQLPYVLGSAHQGCLPPFPADVFMIPQYGYLTLNNGSQAVGRSSFYCLEYFPSQMLRTGNNFTFSYTFEDVPFHSSYAHSQSLDRLMNPLIDQYLYYLSRTNTPSGTTTQSRLQFSQAGASDIRDQSRNWLPGPCYRQQRVSKTKTDNNNSNFTWTGASKYNLNGRESIINPGTAMASHKDDEDKFFPMSGVMIFGKESAGASNTALDNVMITDEEEIKATNPVATERFGTVAVNLQSSSTDPATGDVHVMGALPGMVWQDRDVYLQGPIWAKIPHTDGHFHPSPLMGGFGLKHPPPQILIKNTPVPANPPAEFSATKFASFITQYSTGQVSVEIEWELQKENSKRWNPEVQYTSNYAKSANVDFTVDNNGLYTEPRPIGTRYLTRPL

SEQ ID NO: 345 - DNA, 2214 bp, Artificial Sequence
  source: /note="Description of Artificial Sequence: Synthetic polynucleotide"
atggctgccgatggttatcttccagattggctcgaggacaaccttagtgaaggaattcgcgagtggtgggctttgaaacctggagcccctcaacccaaggcaaatcaacaacatcaagacaacgctcgaggtcttgtgcttccgggttacaaataccttggacccggcaacggactcgacaagggggagccggtcaacgcagcagacgcggcggccctcgagcacgacaaggcctacgaccagcagctgcaggcgggtgacaatccgtacctgcggtataaccacgccgacgccgagtttcaggagcgtctgcaagaagatacgtcttttgggggcaaccttggcagagcagtcttccaggccaaaaagaggatccttgagcctcttggtctggttgaggaagcagctaaaacggctcctggaaagaagaggcctgtagatcagtctcctcaggaaccggactcatcatctggtgttggcaaatcgggcaaacagcctgccagaaaaagactaaatttcggtcagactggcgactcagagtcagtcccagaccctcaacctctcggagaaccaccagcagcccccacaagtttgggatctaatacaatggcttcaggcggtggcgcaccaatggcagacaataacgagggtgccgatggggtgggtagttcctcgggaaattggcattgcgattcccaatgactgggggacagagtcatcaccaccagcacccgaacctgggccctgcccacctacaacaatcacctctacaagcaaatctccaacgggacatcgggaggagccaccaacgacaacacctacttcggctacagcaccccctgggggtattttgactttaacagattccactgccacttttcaccacgtgactggcagcgactcatcaacaacaactggggattccggcccaagagactcagcttcaagctcttcaacatccaggtcaaggaggtcacgcagaatgaaggcaccaagaccatcgccaataacctcaccagcaccatccaggtgtttacggactcggagtaccagctgccgtacgttctcggctctgcgcaccagggctgcctccctccgttcccggcggacgtgttcatgattccgcaatacggctacctgacgctcaacaatggcagccaagccgtgggacgttcatccttttactgcctggaatatttcccttctcagatgctgagaacgggcaacaactttaccttcagctacacctttgaggaagtgcctttccacagcagctacgcgcacagccagagcttggaccggctgatgaatcctctgattgaccagtacctgtactacttgtctcggactcaaacaacaggaggcacggcaaatacgcagactctgggcttcagccaaggtgggcctaatacaatggccaatcaggcaaagaactggctgccaggaccctgttaccgccaacaacgcgtctcaacgacaaccgggcaaaacaacaatagcaactttgcctggactgctgggaccaaataccatctgaatggaagaaattcattggctaatcctggcatcgctatggcaacacacaaagacgacgaggagcgtttttttcccagtaacgggatcctgatttttggcaaacaaaatgctgccagagacaatgcggattacagcgatgtcatgctcaccagcgaggaagaaatcaaaaccactaaccctgtggctacagaggaatacggtatcgtggcagataacttgcagcagcaaaacacggctcctcaaattggaactgtcaacagccagggggccttacccggtatggtctggcagaaccgggacgtgtacctgcagggtcccatctgggccaagattcctcacacggacggcaacttccacccgtctccgctgatgggcggctttggcctgaaacatcctccgcctcagatcctgatcaagaacacgcctgtacctgcggatcctccgaccaccttcaaccagtcaaagctgaactctttcatcacgcaatacagcaccggacaggtcagcgtggagatcgagtgggagctgcagaaggaaaacagcaagcgctggaacccggagatccagtacacttccaactattacaagtctaataatgttgaatttgctgttaatactgaaggtgtatatagtgaaccccgccccattggcaccagatacctgactcgtaatctgtaa

SEQ ID NO: 346 - protein, 736 aa, Artificial Sequence
  source: /note="Description of Artificial Sequence: Synthetic polypeptide"
MAADGYLPDWLEDNLSEGIREWWALKPGAPQPKANQQHQDNARGLVLPGYKYLGPGNGLDKGEPVNAADAAALEHDKAYDQQLQAGDNPYLRYNHADAEFQERLQEDTSFGGNLGRAVFQAKKRILEPLGLVEEAAKTAPGKKRPVDQSPQEPDSSSGVGKSGKQPARKRLNFGQTGDSESVPDPQPLGEPPAAPTSLGSNTMASGGGAPMADNNEGADGVGSSSGNWHCDSQLGDRVITTSTRTWALPTYNNHLYKQISNGTSGGATNDNTYFGYSTPWGYFDFNRFHCHFSPRDWQRLINNNWGFRPKRLSFKLFNIQVKEVTQNEGTKTIANNLTSTIQVFTDSEYQLPYVLGSAHQGCLPPFPADVFMIPQYGYLTLNNGSQAVGRSSFYCLEYFPSQMLRTGNNFTFSYTFEEVPFHSSYAHSQSLDRLMNPLIDQYLYYLSRTQTTGGTANTQTLGFSQGGPNTMANQAKNWLPGPCYRQQRVSTTTGQNNNSNFAWTAGTKYHLNGRNSLANPGIAMATHKDDEERFFPSNGILIFGKQNAARDNADYSDVMLTSEEEIKTTNPVATEEYGIVADNLQQQNTAPQIGTVNSQGALPGMVWQNRDVYLQGPIWAKIPHTDGNFHPSPLMGGFGLKHPPPQILIKNTPVPADPPTTFNQSKLNSFITQYSTGQVSVEIEWELQKENSKRWNPEIQYTSNYYKSNNVEFAVNTEGVYSEPRPIGTRYLTRNL

SEQ ID NO: 347 - DNA, 2214 bp, Artificial Sequence
  source: /note="Description of Artificial Sequence: Synthetic polynucleotide"
atggctgccgatggttatcttccagattggctcgaggacaaccttagtgaaggaattcgcgagtggtgggctttgaaacctggagcccctcaacccaaggcaaatcaacaacatcaagacaacgctcgaggtcttgtgcttccgggttacaaataccttggacccggcaacggactcgacaagggggagccggtcaacgcagcagacgcggcggccctcgagcacgacaaggcctacgaccagcagctgcaggcgggtgacaatccgtacctgcggtataaccacgccgacgccgagtttcaggagcgtctgcaagaagatacgtcttttgggggcaaccttggcagagcagtcttccaggccaaaaagaggatccttgagcctcttggtctggttgaggaagcagctaaaacggctcctggaaagaagaggcctgtagatcagtctcctcaggaaccggactcatcatctggtgttggcaaatcgggcaaacagcctgccagaaaaagactaaatttcggtcagactggcgactcagagtcagtcccagaccctcaacctctcggagaaccaccagcagcccccacaagtttgggatctaatacaatggcttcaggcggtggcgcaccaatggcagacaataacgagggtgccgatggggtgggtagttcctcgggaaattggcattgcgattcccaatggctgggggacagagtcatcaccaccagcacccgaacctgggccctgcccacctacaacaatcacctctacaagcaaatctccaacgggacatcgggaggagccaccaacgacaacacctacttcggctacagcaccccctgggggtattttgactttaacagattccactgccacttttcaccacgtgactggcagcgactcatcaacaacaactggggattccggcccaagagactcagcttcaagctcttcaacatccaggtcaaggaggtcacgcagaatgaaggcaccaagaccatcgccaataacctcaccagcaccatccaggtgtttacggactcggagtaccagctgccgtacgttctcggctctgcgcaccagggctgcctccctccgttcccggcggacgtgttcatgattccgcaatacggctacctgacgctcaacaatggcagccaagccgtgggacgttcatccttttactgcctggaatatttcccttctcagatgctgagaacgggcaacaactttaccttcagctacacctttgaggaagtgccttttcacagcagctacgcgcacagccagagcttggaccggctgatgaatcctctgattgaccagtacctgtactacttgtctcggactcaaacaacaggaggcacggcaaatacgcagactctgggcttcagccaaggtgggcctaatacaatggccaatcaggcaaagaactggctgccaggaccctgttaccgccaacaacgcgtctcaacgacaaccgggcaaaacaacaatagcaactttgcctggactgctgggaccaaataccatctgaatggaagaaattcattggctaatcctggcatcgctatggcaacacacaaagacgacgaggagcgtttttttcccagtaacgggatcctgatttttggcaaacaaaatgctgccagagacaatgcggattacagcgatgtcatgctcaccagcgaggaagaaatcaaaaccactaaccctgtggctacagaggaatacggtatcgtggcagataacttgcagcagcaaaacacggctcctcaaattggaactgtcaacagccagggggccttacccggtatggtctggcagaaccgggacgtgtacctgcagggtcccatctgggccaagattcctcacacggacggcaacttccacccgtctccgctgatgggcggctttggcctgaaacatcctccgcctcagatcctgatcaagaacacgcctgtacctgcggatcctccgaccaccttcaaccagtcaaagctgaactctttcatcacgcaatacagcaccggacaggtcagcgtggagatcgagtgggagctgcagaaggaaaacagcaagcgctggaacccggagatccagtacacttccaactattacaagtctaataatgttgaatttgctgttaatactgaaggtgtatatagtgaaccccgccccattggcaccagatacctgactcgtaatctgtaa

SEQ ID NO: 348 - protein, 737 aa, Artificial Sequence; identical to SEQ ID NO: 336
  source: /note="Description of Artificial Sequence: Synthetic polypeptide"

SEQ ID NO: 349 - DNA, 2211 bp, Artificial Sequence
  source: /note="Description of Artificial Sequence: Synthetic polynucleotide"
atggctgccgatggttatcttccagattggctcgaggacaacctctctgagggcattcgcgagtggtgggacttgaaacctggagcccctaaacccaaggcaaatcaacaacatcaggacaacgctcgaggtcttgtgcttccgggttacaaataccttggacccggcaacggactcgacaagggggagccggtcaacgcagcagacgcggcggccctcgagcacgacaaggcctacgaccagcagctcaaggccggagacaacccgtacctcaagtacaaccacgccgacgccgagttccaggagcggctcaaagaagatacgtcttttgggggcaacctcgggcgagcagtcttccaggccaaaaagaggcttcttgaacctcttggtctggttgaggaagcggctaagacggctcctggaaagaagagaccggtagagccatcaccccagcgttctccagactcctctacgggcatcggcaagaaaggccaacagcccgctaaaaagagactcaattttggtcagactggcgactcagagtcagtccccgacccacaacctctcggagaacctccagcaacccccgctgctgtgggacctactacaatggcttcaggcggtggcgcaccaatggcagacaataacgagggtgccgatggagtgggtaattcctcaggaaattggcattgcgattcccaatggctgggcgacagagtcatcaccaccagcaccagaacctgggccctgcccacttacaacaaccatctctacaagcaaatctccagccaatcaggagcttcaaacgacaaccactactttggctacagcaccccttgggggtattttgactttaacagattccactgccacttttcaccacgtgactggcaaagactcatcaacaacaactggggattccgacccaagagactcaacttcaagctcttcaacatccaagtcaaggaggtcacgacgaatgatggcgtcacgaccatcgctaataaccttaccagcacggttcaagtcttctcggactcggagtaccagttgccgtacgtcctcggctctgcgcaccagggctgcctccctccgttcccggcggacgtgttcatgattccgcagtacggctacctaacgctcaacaatggcagccaagccgtgggacgttcatccttttactgcctggaatatttcccttctcagatgctgagaacgggcaacaactttaccttcagctacacttttgaggacgttcctttccacagcagctacgctcacagccagagtctggaccgtctcatgaatcctctcatcgaccagtacctgtattacttgagcagaacaaacactccaagtggaaccaccacgcagtcaaggcttcagttttctcaggccggagcgagtgacattcgggaccagtctaggaactggcttcctggaccctgttaccgccagcagcgcgtttctaaaacaaaaacagacaacaacaacagcaattttacctggactggtgcttcaaaatataaccttaatgggcgtgaatctataatcaaccctggcactgctatggcctcacacaaagacgacgaagacaagttctttcccatgagcggtgtcatgatttttggaaaagagagcgccggagcttcaaacactgcattggacaatgtcatgattacagacgaagaggaaattaaagccactaaccctgtggccaccgaaagatttgggaccgtggcagtcaatttccagagcagcagcacagaccctgcgaccggagatgtgcatgctatgggagcattacctggcatggtgtggcaagatagagacgtgtacctgcagggtcccatttgggccaaaattcctcacacagatggacactttcacccgtctcctcttatgggcggctttggactcaagaacccgcctcctcagatcctcatcaaaaacacgcctgttcctgcgaatcctccggcggagttttcagctacaaagtttgcttcattcatcacccaatactccacaggacaagtgagtgtggaaattgaatgggagctgcagaaagaaaacagcaagcgctggaatcccgaagtgcagtacacatccaattatgcaaaatctgccaacgttgattttactgtggacaacaatggactttatactgagcctcgccccattggcacccgttaccttacccgtcccctgtaa

SEQ ID NO: 350 - protein, 736 aa, Artificial Sequence
  source: /note="Description of Artificial Sequence: Synthetic polypeptide"
MAADGYLPDWLEDNLSEGIREWWDLKPGAPKPKANQQHQDNARGLVLPGYKYLGPGNGLDKGEPVNAADAAALEHDKAYDQQLKAGDNPYLKYNHADAEFQERLKEDTSFGGNLGRAVFQAKKRLLEPLGLVEEAAKTAPGKKRPVEPSPQRSPDSSTGIGKKGQQPAKKRLNFGQTGDSESVPDPQPLGEPPATPAAVGPTTMASGGGAPMADNNEGADGVGNSSGNWHCDSQWLGDRVITTSTRTWALPTYNNHLYKQISSQSGASNDNHYFGYSTPWGYFDFNRFHCHFSPRDWQRLINNNWGFRPKRLNFKLFNIQVKEVTTNDGVTTIANNLTSTVQVFSDSEYQLPYVLGSAHQGCLPPFPADVFMIPQYGYLTLNNGSQAVGRSSFYCLEYFPSQMLRTGNNFTFSYTFEDVPFHSSYAHSQSLDRLMNPLIDQYLYYLSRTNTPSGTTTQSRLQFSQAGASDIRDQSRNWLPGPCYRQQRVSKTKTDNNNSNFTWTGASKYNLNGRESIINPGTAMASHKDDEDKFFPMSGVMIFGKESAGASNTALDNVMITDEEEIKATNPVATERFGTVAVNFQSSSTDPATGDVHAMGALPGMVWQDRDVYLQGPIWAKIPHTDGHFHPSPLMGGFGLKNPPPQILIKNTPVPANPPAEFSATKFASFITQYSTGQVSVEIEWELQKENSKRWNPEVQYTSNYAKSANVDFTVDNNGLYTEPRPIGTRYLTRPL

SEQ ID NO: 351 - DNA, 2211 bp, Artificial Sequence
  source: /note="Description of Artificial Sequence: Synthetic polynucleotide"
atggctgccgatggttatcttccagattggctcgaggacaaccttagtgaaggaattcgcgagtggtgggcgctgaaacctggagccccgaagcccaaagccaaccagcaaaagcaggacgacggccggggtctggtgcttccgggttacaaatacctcggacccggtaacggactcgacaaaggagagccggtcaacgaggcggacgcggcagccctcgagcacgacaaggcctacgaccagcagctcaaagcgggtgacaatccgtacctgcggtataaccacgccgacgccgagtttcaggagcgtctgcaagaagatacgtcttttgggggcaacctcgggcgagcagtcttccaggccaagaagcgggttctcgaacctctcggtctggttgaggaaggcgctaagacggctcccggaaagaaacgtccggtagagcagtcgccacaagagccagactcctctacgggcatcggcaagaaaggccaacagcccgccagaaaaagactcaatttcggtcagactggcgactcagagtcagttccagaccctcaacctctcggagaacctccagcagcgccctctggtgtgggacctactacaatggcttcaggcggtggcgcaccaatggcagacaataacgaaggcgccgacggagtgggtaatgcctcaggaaattggcattgcgattccacatggctgggcgacagagtcatcaccaccagcacccgaacatgggccttgcccacctataacaaccacctctacaagcaaatctccagtgcttcaacgggggccagcaacgacaacacctacttcggctacagcaccccctgggggtattttgatttcaacagattccactgccatttctcaccacgtgactggcagcgactcatcaacaacaattggggattccggcccaagagactcaacttcaaactcttcaacatccaagtcaaggaggtcacgacgaatgatggcgtcacgaccatcgctaataaccttaccagcacggttcaagtcttctcggactcggagtaccagttgccgtacgtcctcggctctgcgcaccagggctgcctccctccgttcccggcggacgtgttcatgattccgcagtacggctacctaacgctcaacaatggcagccaggcagtgggacggtcatccttttactgcctggaatatttcccatcgcagatgctgagaacgggcaataactttaccttcagctacaccttcgaggacgtgcctttccacagcagctacgcgcacagccagagcctggaccggctgatgaatcctctcatcgaccagtacctgtattacctgaacagaactcagaatcagtccggaagtgcccaaaacaaggacttgctgtttagccgggggtctccagctggcatgtctgttcagcccaaaaactggctacctggaccctgttatcggcagcagcgcgtttctaaaacaaaaacagacaacaacaacagcaattttacctggactggtgcttcaaaatataacctcaatgggcgtgaatccatcatcaaccctggcactgctatggcctcacacaaagacgacgaagacaagttctttcccatgagcggtgtcatgatttttggaaaagagagcgccggagcttcaaacactgcattggacaatgtcatgattacagacgaagaggaaattaaagccactaaccctgtggccaccgaaagatttgggaccgtggcagtcaatttccagagcagcagcacagaccctgcgaccggagatgtgcatgttatgggagccttacctggaatggtgtggcaagacagagacgtatacctgcagggtcctatttgggccaaaattcctcacacagatggacactttcacccgtctcctcttatgggcggctttggactcaagaacccgcctcctcagatcctcatcaaaaacacgcctgttcctgcgaatcctccggcagagttttcggctacaaagtttgcttcattcatcacccagtattccacaggacaagtgagcgtggagattgaatgggagctgcagaaagaaaacagcaaacgctggaatcccgaagtgcagtatacatctaactatgcaaaatctgccaacgttgatttcactgtggacaacaatggactttatactgagcctcgccccattggcacccgttacctcacccgtcccctgtaa

SEQ ID NO: 352 - protein, 736 aa, Artificial Sequence
  source: /note="Description of Artificial Sequence: Synthetic polypeptide"
MAADGYLPDWLEDNLSEGIREWWALKPGAPKPKANQQKQDDGRGLVLPGYKYLGPGNGLDKGEPVNEADAAALEHDKAYDQQLKAGDNPYLRYNHADAEFQERLQEDTSFGGNLGRAVFQAKKRVLEPLGLVEEGAKTAPGKKRPVEQSPQEPDSSTGIGKKGQQPARKRLNFGQTGDSESVPDPQPLGEPPAAPSGVGPTTMASGGGAPMADNNEGADGVGNASGNWHCDSTWLGDRVITTSTRTWALPTYNNHLYKQISSASTGASNDNTYFGYSTPWGYFDFNRFHCHFSPRDWQRLINNNWGFRPKRLNFKLFNIQVKEVTTNDGVTTIANNLTSTVQVFSDSEYQLPYVLGSAHQGCLPPFPADVFMIPQYGYLTLNNGSQAVGRSSFYCLEYFPSQMLRTGNNFTFSYTFEDVPFHSSYAHSQSLDRLMNPLIDQYLYYLNRTQNQSGSAQNKDLLFSRGSPAGMSVQPKNWLPGPCYRQQRVSKTKTDNNNSNFTWTGASKYNLNGRESIINPGTAMASHKDDEDKFFPMSGVMIFGKESAGASNTALDNVMITDEEEIKATNPVATERFGTVAVNFQSSSTDPATGDVHVMGALPGMVWQDRDVYLQGPIWAKIPHTDGHFHPSPLMGGFGLKNPPPQILIKNTPVPANPPAEFSATKFASFITQYSTGQVSVEIEWELQKENSKRWNPEVQYTSNYAKSANVDFTVDNNGLYTEPRPIGTRYLTRPL

SEQ ID NO: 353 - DNA, 2205 bp, Artificial Sequence
  source: /note="Description of Artificial Sequence: Synthetic polynucleotide"
atggctgctgacggttatcttccagattggctcgaggacaacctttctgaaggcattcgtgagtggtgggctctgaaacctggagtccctcaacccaaagcgaaccaacaacaccaggacaaccgtcggggtcttgtgcttccgggttacaaatacctcggacccggtaacggactcgacaaaggagagccggtcaacgaggcggacgcggcagccctcgaacacgacaaggcctacgaccagcagctcaaggccggagacaacccgtacctcaagtacaaccacgccgacgccgagttccaggagcggctcaaagaagatacgtcttttgggggcaacctcgggcgagcagtcttccaggccaaaaagaggcttcttgaacctcttggtctggttgaggaagcggctaagacggctcctggaaagaagaggcctgtagagcagtctcctcaggaaccggactcctccgcgggtattggcaaatcgggtgcacagcccgctaaaaagagactcaatttcggtcagactggcgacacagagtcagtcccagaccctcaaccaatcggagaacctcccgcagccccctcaggtgtgggatctcttacaatggcttcaggtggtggcgcaccagtggcagacaataacgaaggtgccgatggagtgggtagttcctcgggaaattggcattgcgattcccaatggctgggggacagagtcatcaccaccagcacccgaacctgggccctgcccacctacaacaaccacctctacaaacaaatttccagccaatcaggagcctcgaacgacaatcactactttggctacagcaccccttgggggtattttgacttcaacagattccactgccacttttcaccacgtgactggcagcgactcatcaacaacaactggggattccggcccaagagactcagcttcaagctcttcaacatccaggtcaaagaggttacggacaacaatggagtcaagaccatcgccaataaccttaccagcacggtccaggtcttcacggactcagactatcagctcccgtacgtgctcgggtcggctcacgagggctgcctcccgccgttcccagcggacgttttcatgattcctcagtacgggtatctgacgcttaatgatggaagccaggccgtgggtcgttcgtccttttactgcctggaatatttcccgtcgcaaatgctaagaacgggtaacaacttccagttcagctacgagtttgagaacgtacctttccatagcagctacgctcacagccaaagcctggaccgactaatgaatccactcatcgaccaatacttgtactatctctcaaagactattaacggttctggacagaatcaacaaacgctaaaattcagtgtggccggacccagcaacatggctgtccagggaagaaactacatacctggacccagctaccgacaacaacgtgtctcaaccactgtgactcaaaacaacaacagcgaatttgcttggcctggagcttcttcttgggctctcaatggacgtaatagcttgatgaatcctggacctgctatggccagccacaaagaaggagaggaccgtttctttcctttgtctggatctttaatttttggcaaacaaggaactggaagagacaacgtggatgcggacaaagtcatgataaccaacgaagaagaaattaaaactactaacccggtagcaacggagtcctatggacaagtggccacaaaccaccagagtgcccaagcacaggcgcagaccggctgggttcaaaaccaaggaatacttccgggtatggtttggcaggacagagatgtgtacctgcaaggacccatctgggccaagattcctcacacggacggcaacttccacccgtctccgctgatgggcggctttggcctgaaacatcctccgcctcagatcctgatcaagaacacgcctgtacctgcggatcctccgaccaccttcaaccagtcaaagctgaactctttcatcacgcaatacagcaccggacaggtcagcgtggaaattgaatgggagctgcagaaggaaaacagcaagcgctggaatcccgaagtgcagtatacatctaactatgcaaaatctgccaacgttgatttcactgtggacaacaatggactttatactgagcctcgccccattggcacccgttacctcacccgtcccctgtaa

SEQ ID NO: 354 - protein, 734 aa, Artificial Sequence
  source: /note="Description of Artificial Sequence: Synthetic polypeptide"
MAADGYLPDWLEDNLSEGIREWWALKPGVPQPKANQQHQDNRRGLVLPGYKYLGPGNGLDKGEPVNEADAAALEHDKAYDQQLKAGDNPYLKYNHADAEFQERLKEDTSFGGNLGRAVFQAKKRLLEPLGLVEEAAKTAPGKKRPVEQSPQEPDSSAGIGKSGAQPAKKRLNFGQTGDTESVPDPQPIGEPPAAPSGVGSLTMASGGGAPVADNNEGADGVGSSSGNWHCDSQWLGDRVITTSTRTWALPTYNNHLYKQISSQSGASNDNHYFGYSTPWGYFDFNRFHCHFSPRDWQRLINNNWGFRPKRLSFKLFNIQVKEVTDNNGVKTIANNLTSTVQVFTDSDYQLPYVLGSAHEGCLPPFPADVFMIPQYGYLTLNDGSQAVGRSSFYCLEYFPSQMLRTGNNFQFSYEFENVPFHSSYAHSQSLDRLMNPLIDQYLYYLSKTINGSGQNQQTLKFSVAGPSNMAVQGRNYIPGPSYRQQRVSTTVTQNNNSEFAWPGASSWALNGRNSLMNPGPAMASHKEGEDRFFPLSGSLIFGKQGTGRDNVDADKVMITNEEEIKTTNPVATESYGQVATNHQSAQAQAQTGWVQNQGILPGMVWQDRDVYLQGPIWAKIPHTDGNFHPSPLMGGFGLKHPPPQILIKNTPVPADPPTTFNQSKLNSFITQYSTGQVSVEIEWELQKENSKRWNPEVQYTSNYAKSANVDFTVDNNGLYTEPRPIGTRYLTRPL

SEQ ID NO: 355 - DNA, 2211 bp, Artificial Sequence
  source: /note="Description of Artificial Sequence: Synthetic polynucleotide"
atggctgccgatggttatcttccagattggctcgaggacaacctctctgagggcattcgcgagtggtgggcgctgaaacctggagccccgaagcccaaagccaaccagcaaaagcaggacgacggccggggtctggtgcttcctggctacaagtacctcggacccttcaacggactcgacaagggggagcccgtcaacgcggcggacgcagcggccctcgagcacgacaaggcctacgaccagcagctgcaggcgggtgacaatccgtacctgcggtataaccacgccgacgccgagtttcaggagcgtctgcaagaagatacgtcttttgggggcaacctcgggcgagcagtcttccaggccaagaagtgggttctcgaacctctcggtctggttgaggaaggcgctaagacggctcctggaaagaaacgtccggtagagcagtcgccacaagagccagactcctcctcgggcatcggcaagacaggccagcagcccgctaaaaagagactcaattttggtcagactggcgactcagagtcagtccccgacccacaacctctcggagaacctccagcaacccccgctgctgtgggacctactacaatggcttcaggcggtggcgcaccaatggcagacaataacgaaggcgccgacggagtgggtaatgcctcaggaaattggcattgcgattccacatggctgggcgacagagtcatcaccaccagcacccgcacctgggccttgcccacctacaataaccacctctacaagcaaatctccagtgcttcaacgggggccagcaacgacaaccactacttcggctacagcaccccctgggggtattttgatttcaacagattccactgccatttctcaccacgtgactggcagcgactcatcaacaacaattggggattccggcccaagagactcaacttcaagctcttcaacatccaagtcaaggaggtcacgacgaatgatggcgtcacaaccatcgctaataaccttaccagcacggttcaagtcttctcggactcggagtaccagcttccgtacgtcctcggctctgcgcaccagggctgcctccctccgttcccggcggacgtgttcatgattccgcaatacggctacctgacgctcaacaatggcagccaagccgtgggacgttcatccttttactgcctggaatatttcccttctcagatgctgagaacgggcaacaactttaccttcagctacacctttgaggaagtgcctttccacagcagctacgcgcacagccagagcctggaccggctgatgaatcctctcatcgaccaatacctgtattacctgaacagaactcaaaatcagtccggaagtgcccaaaacaaggacttgctgtttagccgtgggtctccagctggcatgtctgttcagcccaaaaactggctacctggaccctgttatcggcagcagcgcgtttctaaaacaaaaacagacaacaacaacagcaattttacctggactggtgcttcaaaatataacctcaatgggcgtgaatccatcatcaaccctggcactgctatggcctcacacaaagacgacgaagacaagttctttcccatgagcggtgtcatgatttttggaaaggagagcgccggagcttcaaacactgcattggacaatgtcatgatcaccgacgaagaggaaatcaaagccactaaccccgtggccaccgaaagatttgggactgtggcagtcaatctccagagcagcagcacagaccctgcgaccggagatgtgcatgttatgggagccttacctggcatggtgtggcaagatagagacgtgtacctgcagggtcccatttgggccaaaattcctcacacagatggacactttcacccgtctcctcttatgggcggctttggactcaagaacccgcctcctcagatcctcatcaaaaacacgcctgttcctgcgaatcctccggcggagttttcagctacaaagtttgcttcattcatcacccaatactccacaggacaagtgagtgtggaaattgaatgggagctgcagaaagaaaacagcaagcgctggaatcccgaagtgcagtacacatccaattatgcaaaatctgccaacgttgattttactgtggacaacaatggactttatactgagcctcgccccattggcacccgttacctcacccgtcccctgtaa

SEQ ID NO: 356 - protein, 736 aa, Artificial Sequence
  source: /note="Description of Artificial Sequence: Synthetic polypeptide"
MAADGYLPDWLEDNLSEGIREWWALKPGAPKPKANQQKQDDGRGLVLPGYKYLGPFNGLDKGEPVNAADAAALEHDKAYDQQLQAGDNPYLRYNHADAEFQERLQEDTSFGGNLGRAVFQAKKWVLEPLGLVEEGAKTAPGKKRPVEQSPQEPDSSSGIGKTGQQPAKKRLNFGQTGDSESVPDPQPLGEPPATPAAVGPTTMASGGGAPMADNNEGADGVGNASGNWHCDSTWLGDRVITTSTRTWALPTYNNHLYKQISSASTGASNDNHYFGYSTPWGYFDFNRFHCHFSPRDWQRLINNNWGFRPKRLNFKLFNIQVKEVTTNDGVTTIANNLTSTVQVFSDSEYQLPYVLGSAHQGCLPPFPADVFMIPQYGYLTLNNGSQAVGRSSFYCLEYFPSQMLRTGNNFTFSYTFEEVPFHSSYAHSQSLDRLMNPLIDQYLYYLNRTQNQSGSAQNKDLLFSRGSPAGMSVQPKNWLPGPCYRQQRVSKTKTDNNNSNFTWTGASKYNLNGRESIINPGTAMASHKDDEDKFFPMSGVMIFGKESAGASNTALDNVMITDEEEIKATNPVATERFGTVAVNLQSSSTDPATGDVHVMGALPGMVWQDRDVYLQGPIWAKIPHTDGHFHPSPLMGGFGLKNPPPQILIKNTPVPANPPAEFSATKFASFITQYSTGQVSVEIEWELQKENSKRWNPEVQYTSNYAKSANVDFTVDNNGLYTEPRPIGTRYLTRPL

SEQ ID NO: 357 - DNA, 2214 bp, Artificial Sequence
  source: /note="Description of Artificial Sequence: Synthetic polynucleotide"
atggctgccgatggttatcttccagattggctcgaggacaaccttagtgaaggaattcgcgagtggtgggctttgaaacctggagcccctcaacccaaggcaaatcaacaacatcaagacaacgctcgaggtcttgtgcttccgggttacaaataccttggacccggcaacggactcgacaagggggagccggtcaacgcagcagacgcggcggccctcgagcacgacaaggcctacgaccagcagctgcaggcgggtgacaatccgtacctgcggtataaccacgccgacgccgagtttcaggagcgtctgcaagaagatacgtcttttgggggcaaccttggcagagcagtcttccaggccaaaaagaggatccttgagcctcttggtctggttgaggaagcagctaaaacggctcctggaaagaagaggcctgtagatcagtctcctcaggaaccggactcatcatctggtgttggcaaatcgggcaaacagcctgccagaaaaagactaaatttcggtcagactggcgactcagagtcagtcccagaccctcaacctctcggagaaccaccagcagcccccacaagtttgggatctaatacaatggcttcaggcggtggcgcaccaatggcagacaataacgagggtgccgatggggtgggtagttcctcgggaaattggcattgcgattcccaatggctgggggacagagtcatcaccaccagcacccgaacctgggccctgcccacctacaacaatcacctctacaagcaaatctccaacgggacatcgggaggagccaccaacgacaacacctacttcggctacagcaccccctgggggtattttgactttaacagattccactgccacttttcaccacgtgactggcagcgactcatcaacaacaactggggattccggcccaagagactcagcttcaagctcttcaacatccaggtcaaggaggtcacgcagaatgaaggcaccaagaccatcgccaataacctcaccagcaccatccaggtgtttacggactcggagtaccagctgccgtacgttctcggctcggcgcaccagggctgcctccctccgttcccggcggacgtcttcatggtgccacagtatggatacctgacgctcaacaatggcagccaagccgtgggacgttcatccttttactgcctggaatatttcccttctcagatgctgagaacgggcaacaactttaccttcagctacacctttgaggaagtgcctttccacagcagctacgcgcacagccagagcttggaccggctgatgaatcctctgattgaccagtacctgtactacttgtctcggactcaaacaacaggaggcacggcaaatacgcagactctgggcttcagccaaggtgggcctaatacaatggccaatcaggcaaagaactggctgccaggaccctgttaccgccaacaacgcgtctcaacgacaaccgggcaaaacaacaatagcaactttgcctggactgctgggaccaaataccatctgaatggaagaaattcattggctaatcctggcatcgctatggcaacacacaaagacgacgaggagcgtttttttcccagtaacgggatcctgatttttggcaaacaaaatgctgccagagacaatgcggattacagcgatgtcatgctcaccagcgaggaagaaatcaaaaccactaaccctgtggctacagaggaatacggtatcgtggcagataacttgcagcagcaaaacacggctcctcaaattggaactgtcaacagccagggggacttacccggtatggtctggcagaaccgggacgtgtacctgcagggtcccatctgggccaagattcctcacacggacggcaacttccacccgtctccgctgatgggcggctttggcctgaaacatcctccgcctcagatcctgatcaagaacacgcctgtacctgcggatcctccgaccaccttcaaccagtcaaagctgaactctttcatcacgcaatacagcaccggacaggtcagcgtggagatcgagtgggagctgcagaaggaaaacagcaagcgctggaacccggagatccagtacacttccaactattacaagtctaataatgttgaatttgctgttaatactgaaggtgtatatagtgaaccccgccccattggcaccagatacctgactcgtaatctgtaa

SEQ ID NO: 358 - protein, 737 aa, Artificial Sequence
  source: /note="Description of Artificial Sequence: Synthetic polypeptide"
MAADGYLPDWLEDNLSEGIREWWALKPGAPQPKANQQHQDNARGLVLPGYKYLGPGNGLDKGEPVNAADAAALEHDKAYDQQLQAGDNPYLRYNHADAEFQERLQEDTSFGGNLGRAVFQAKKRILEPLGLVEEAAKTAPGKKRPVDQSPQEPDSSSGVGKSGKQPARKRLNFGQTGDSESVPDPQPLGEPPAAPTSLGSNTMASGGGAPMADNNEGADGVGSSSGNWHCDSQWLGDRVITTSTRTWALPTYNNHLYKQISNGTSGGATNDNTYFGYSTPWGYFDFNRFHCHFSPRDWQRLINNNWGFRPKRLSFKLFNIQVKEVTQNEGTKTIANNLTSTIQVFTDSEYQLPYVLGSAHQGCLPPFPADVFMVPQYGYLTLNNGSQAVGRSSFYCLEYFPSQMLRTGNNFTFSYTFEEVPFHSSYAHSQSLDRLMNPLIDQYLYYLSRTQTTGGTANTQTLGFSQGGPNTMANQAKNWLPGPCYRQQRVSTTTGQNNNSNFAWTAGTKYHLNGRNSLANPGIAMATHKDDEERFFPSNGILIFGKQNAARDNADYSDVMLTSEEEIKTTNPVATEEYGIVADNLQQQNTAPQIGTVNSQGDLPGMVWQNRDVYLQGPIWAKIPHTDGNFHPSPLMGGFGLKHPPPQILIKNTPVPADPPTTFNQSKLNSFITQYSTGQVSVEIEWELQKENSKRWNPEIQYTSNYYKSNNVEFAVNTEGVYSEPRPIGTRYLTRNL

SEQ ID NO: 359 - DNA, 2205 bp, Artificial Sequence
  source: /note="Description of Artificial Sequence: Synthetic polynucleotide"
atggctgctgacggttatcttccagattggctcgaggacaacctttctgaaggcattcgtgagtggtgggctctgaaacctggagtccctcaacccaaagcgaaccaacaacaccaggacaactgtcggggtcttgtgcttccgggttacaaatacctcggacccggtaacggactcgacaaaggagagccggtcaacgaggcggacgcggcagccctcgaacacgacaaggcctacgaccagcagctcaaggccggagacaacccgtacctcaagtacaaccacgccgacgccgagttccaggagcggctcaaagaagatacgtcttttgggggcaacctcgggcgagcagtcttccagaccaaaaagaggcttcttgaacctcttggtctggttgaggaagcggctaagacggctcctggaaagaagaggcctgtagagcagtctcctcaggaaccggactcctccgcgggtattggcaaatcgggtgcacagcccgctaaaaagagactcaatttcggtcagactggcgacacagagtcagtcccagaccctcaaccaatcggagaacctcccgcagccccctcaggtgtgggatctcttacaatggcttcaggtggtggcgcaccagtggcagacaataacgaaggtgccgatggagtgggtagttcctcgggaaattggcattgcgattcccaatggctgggggacagagtcatcaccaccagcacccgaacctgggccctgcccacctacaacaaccacctctacaaacaaatttccagccaatcaggagcctcgaacgacaatcactactttggctacagcaccccttgggggtattttgacttcaacagattccactgccacttttcaccacgtgactggcagcgactcatcaacaacaactggggattccggcccaagagactcagcttcaagctcttcaacatccaggtcaaagaggttacggacaacaatggagtcaagaccatcgccaataaccttaccagcacggtccaggtcttcacggactcagactatcagctcccgtacgtgctcgggtcggctcacgagggctgcctcccgccgttcccagcggacgttttcatgattcctcagtacgggtatctgacgcttaatgatggaagccaggccgtgggtcgttcgtccttttactgcctggaatatttcccgtcgcaaatgctaagaacgggtaacaacttccagttcagctacgagtttgagaacgtacctttccatagcagctacgctcacagccaaagcctggaccgactaatgaatccactcatcgaccaatacttgtactatctctcaaagactattaacggttctggacagaatcaacaaacgctaaaattcagtgtggccggacccagcaacatggctgtccagggaagaaactacatacctggacccagctaccgacaacaacgtgtctcaaccactgtgactcaaaacaacaacagcgaatttgcttggcctggagcttcttcttgggctctcaatggacgtaatagcttgatgaatcctggacctgctatggccagccacaaagaaggagaggaccgtttctttcctttgtctggatctttaatttttggcaaacaaggaactggaagagacaacgtggatgcggacaaagtcatgataaccaacgaagaagaaattaaaactactaacccggtagcaacggagtcctatggacaagtggccacaaaccaccagagtgcccaagcacaggcgcagaccggctgggttcaaaaccaaggaatacttccgggtatggtttggcaggacagagatgtgtacctgcaaggacccatctgggccaagattcctcacacggacggcaacttccacccgtctccgctgatgggcggctttggcctgaaacatcctccgcctcagatcctgatcaagaacacgcctgttcctgcgaatcctccggcggagttttcagctacaaagtttgcttcattcatcacccagtactccacaggacaagtgagtgtggaaattgaatgggagctgcagaaagaaaacagcaagcgctggaatcccgaagtgcagtacacatccaattatgcaaaatctgccaacgttgattttactgtggacaacaatggactttatactgagcctcgccccattggcacccgttaccttaccaaacctctgtaa

SEQ ID NO: 360 - protein, 734 aa, Artificial Sequence
  source: /note="Description of Artificial Sequence: Synthetic polypeptide"
MAADGYLPDWLEDNLSEGIREWWALKPGVPQPKANQQHQDNCRGLVLPGYKYLGPGNGLDKGEPVNEADAAALEHDKAYDQQLKAGDNPYLKYNHADAEFQERLKEDTSFGGNLGRAVFQTKKRLLEPLGLVEEAAKTAPGKKRPVEQSPQEPDSSAGIGKSGAQPAKKRLNFGQTGDTESVPDPQPIGEPPAAPSGVGSLTMASGGGAPVADNNEGADGVGSSSGNWHCDSQWLGDRVITTSTRTWALPTYNNHLYKQISSQSGASNDNHYFGYSTPWGYFDFNRFHCHFSPRDWQRLINNNWGFRPKRLSFKLFNIQVKEVTDNNGVKTIANNLTSTVQVFTDSDYQLPYVLGSAHEGCLPPFPADVFMIPQYGYLTLNDGSQAVGRSSFYCLEYFPSQMLRTGNNFQFSYEFENVPFHSSYAHSQSLDRLMNPLIDQYLYYLSKTINGSGQNQQTLKFSVAGPSNMAVQGRNYIPGPSYRQQRVSTTVTQNNNSEFAWPGASSWALNGRNSLMNPGPAMASHKEGEDRFFPLSGSLIFGKQGTGRDNVDADKVMITNEEEIKTTNPVATESYGQVATNHQSAQAQAQTGWVQNQGILPGMVWQDRDVYLQGPIWAKIPHTDGNFHPSPLMGGFGLKHPPPQILIKNTPVPANPPAEFSATKFASFITQYSTGQVSVEIEWELQKENSKRWNPEVQYTSNYAKSANVDFTVDNNGLYTEPRPIGTRYLTKPL

SEQ ID NO: 361 - DNA, 2211 bp, Artificial Sequence
  source: /note="Description of Artificial Sequence: Synthetic polynucleotide"
atggctgccgatggttatcttccagattggctcgaggacaacctctctgagggcattcgcgagtggtgggacttgaaacctggagcccctaaacccaaggcaaatcaacaacatcaggacaacgctcgaggtcttgtgcttccgggttacaaataccttggacccggcaacggactcgacaagggggagccggtcaacgcagcagacgcggcggccctcgagcacgacaaggcctacgaccagcagctcaaggccggagacaacccgtacctcaagtacaaccacgccgacgccgagttccaggagcggctcaaagaagatacgtcttttgggggcaacctcgggcgagcagtcttccaggccaaaaagaggcttcttgaacctcttggtctggttgaggaagcggctaagacggctcctggaaagaagagaccggtagagccatcaccccagcgttctccagactcctctacgggcatcggcaagaaaggccaacagcccgctaaaaagagactcaattttggtcagactggcgactcagagtcagtccccgacccacaacctctcggagaacctccagcaacccccgctgctgtgggacctactacaatggcttcaggcggtggcgcaccaatggcagacaataacgagggtgccgatggagtgggtaattcctcaggaaattggcattgcgattcccaatggctgggcgacagagtcatcaccaccagcaccagaacctgggccctgcccacttacaacaaccatctctacaagcaaatctccagccaatcaggagcttcaaacgacaaccactactttggctacagcaccccttgggggtattttgactttaacagattccactgccacttttcaccacgtgactggcaaagactcatcaacaacaactggggattccgacccaagagactcaacttcaagctcttcaacatccaagtcaaggaggtcacgacgaatgatggcgtcacgaccatcgctaataaccttaccagcacggttcaagtcttctcggactcggagtaccagttgccgtacgtcctcggctctgcgcaccagggctgcctccctccgttcccggcggacgtgttcatgattccgcagtacggctacctaacgctcaacaatggcagccaagccgtgggacgttcatccttttactgcctggaatatttcccttctcagatgctgagaacgggcaacaactttaccttcagctacacttttgaggacgttcctttccacagcagctacgctcacagccagagtctggaccgtctcatgaatcctctcatcgaccagtacctgtattacttgagcagaacaaacactccaagtggaaccaccacgcagtcaaggcttcagttttctcaggccggagcgagtgacattcgggaccagtctaggaactggcttcctggaccctgttaccgccagcagcgcgtttctaaaacaaaaacagacaacaacaacagcaattttacctggactggtgcttcaaaatataaccttaatgggcgtgaatctataatcaaccctggcactgctatggcctcacacaaagacgacgaagacaagttctttcccatgagcggtgtcatgatttttggaaaagagagcgccggagcttcaaacactgcattggacaatgtcatgatcacagacgaagaggaaatcaaagccactaaccccgtggccaccgaaagatttgggactgtggcagtcaatctccagagcagcagcacagaccctgcgaccggagatgtgcatgttatgggagcattacctggcatggtgtggcaagatagagacgtgtacctgcagggtcccatttgggccaaaattcctcacacagatggacactttcacccgtctcctcttatgggcggctttggactcaagaacccgcctcctcagatcctcatcaaaaacacgcctgttcctgcgaatcctccggcggagttttcagctacaaagtttgcttcattcatcacccaatactccacaggacaagtgagtgtggaaattgaatgggagctgcagaaagaaaacagcaagcgctggaatcccgaagtgcagtacacatccaattatgcaaaatctgccaacgttgattttactgtggacaacaatggactttatactgagcctcgccccattggcacccgttaccttacccgtcccctgtaa

SEQ ID NO: 362 - protein, 736 aa, Artificial Sequence
  source: /note="Description of Artificial Sequence: Synthetic polypeptide"
MAADGYLPDWLEDNLSEGIREWWDLKPGAPKPKANQQHQDNARGLVLPGYKYLGPGNGLDKGEPVNAADAAALEHDKAYDQQLKAGDNPYLKYNHADAEFQERLKEDTSFGGNLGRAVFQAKKRLLEPLGLVEEAAKTAPGKKRPVEPSPQRSPDSSTGIGKKGQQPAKKRLNFGQTGDSESVPDPQPLGEPPATPAAVGPTTMASGGGAPMADNNEGADGVGNSSGNWHCDSQWLGDRVITTSTRTWALPTYNNHLYKQISSQSGASNDNHYFGYSTPWGYFDFNRFHCHFSPRDWQRLINNNWGFRPKRLNFKLFNIQVKEVTTNDGVTTIANNLTSTVQVFSDSEYQLPYVLGSAHQGCLPPFPADVFMIPQYGYLTLNNGSQAVGRSSFYCLEYFPSQMLRTGNNFTFSYTFEDVPFHSSYAHSQSLDRLMNPLIDQYLYYLSRTNTPSGTTTQSRLQFSQAGASDIRDQSRNWLPGPCYRQQRVSKTKTDNNNSNFTWTGASKYNLNGRESIINPGTAMASHKDDEDKFFPMSGVMIFGKESAGASNTALDNVMITDEEEIKATNPVATERFGTVAVNLQSSSTDPATGDVHVMGALPGMVWQDRDVYLQGPIWAKIPHTDGHFHPSPLMGGFGLKNPPPQILIKNTPVPANPPAEFSATKFASFITQYSTGQVSVEIEWELQKENSKRWNPEVQYTSNYAKSANVDFTVDNNGLYTEPRPIGTRYLTRPL

SEQ ID NO: 363 - DNA, 2214 bp, Artificial Sequence; identical to SEQ ID NO: 335
  source: /note="Description of Artificial Sequence: Synthetic polynucleotide"

SEQ ID NO: 364 - protein, 737 aa, Artificial Sequence; identical to SEQ ID NO: 336
  source: /note="Description of Artificial Sequence: Synthetic polypeptide"

SEQ ID NO: 365 - DNA, 2205 bp, Artificial Sequence
  source: /note="Description of Artificial Sequence: Synthetic polynucleotide"
atggctgctgacggttatcttccagattggctcgaggacaacctttctgaaggcattcgtgagtggtgggctctgaaacctggagtccctcaacccaaagcgaaccaacaacaccaggacaaccgtcggggtcttgtgcttccgggttacaaatacctcggacccggtaacggactcgacaaaggagagccggtcaacgaggcggacgcggcagccctcgaacacgacaaggcctacgaccagcagctcaaggccggagacaacccgtacctcaagtacaaccacgccgacgccgagttccaggagcggctcaaagaagatacgtcttttgggggcaacctcgggcgagcagtcttccaggccaaaaagaggcttcttgaacctcttggtctggttgaggaagcggctaagacggctcctggaaagaagaggcctgtagagcagtctcctcaggaaccggactcctccgcgggtattggcaaatcgggtgcacagcccgctaaaaagagactcaatttcggtcagactggcgacacagagtcagtcccagaccctcaaccaatcggagaacctcccgcagccccctcaggtgtgggatctcttacaatggcttcaggtggtggcgcaccagtggcagacaataacgaaggtgccgatggagtgggtagttcctcgggaaattggcattgcgattcccaatggctgggggacagagtcatcaccaccagcacccgaacctgggccctgcccacctacaacaaccacctctacaaacaaatttccagccaatcaggagcctcgaacgacaatcactactttggctacagcaccccttgggggtattttgacttcaacagattccactgccacttttcaccacgtgactggcagcgactcatcaacaacaactggggattccggcccaagagactcagcttcaagctcttcaacatccaggtcaaagaggttacggacaacaatggagtcaagaccatcgccaataaccttaccagcacggtccaggtcttcacggactcagactatcagctcccgtacgtgctcgggtcggctcacgagggctgcctcccgccgttcccagcggacgttttcatgattcctcagtacgggtatctgacgcttaatgatggaagccaggccgtgggtcgttcgtccttttactgcctggaatatttcccgtcgcaaatgctaagaacgggtaacaacttccagttcagctacgagtttgagaacgtacctttccatagcagctacgctcacagccaaagcctggaccgactaatgaatccactcatcgaccaatacttgtactatctctcaaagactattaacggttctggacagaatcaacaaacgctaaaattcagtgtggccggacccagcaacatggctgtccagggaagaaactacatacctggacccagctaccgacaacaacgtgtctcaaccactgtgactcaaaacaacaacagcgaatttgcttggcctggagcttcttcttgggctctcaatggacgtaatagcttgatgaatcctggacctgctatggccagccacaaagaaggagaggaccgtttctttcctttgtctggatctttaatttttggcaaacaaggaactggaagagacaacgtggatgcggacaaagtcatgataaccaacgaagaagaaattaaaactactaacccggtagcaacggagtcctatggacaagtggccacaaaccaccagagtgcccaagcacaggcgcagaccggctgggttcaaaaccaaggaatacttccgggtatggtttggcaggacagagatgtgtacctgcaaggacccatttgggccaaaattcctcacacggacggcaactttcacccttctccgctgatgggagggtttggaatgaaacacccgcctcctcagatcctcatcaaaaacacacctgtacctgcggatcctccaacggccttcaacaaggacaagctgaactctttcatcacccagtattctactggccaagtcagcgtggagatcgagtgggagctgcagaaggaaaacagcaagcgctggaaccccgagatccagtacacctccaactactacaaatctacaagtgtggactttgctgttaatacagaaggcgtgtactctgaaccccgccccattggcacccgttacctcacccgtaatctgtaa

SEQ ID NO: 366 - protein, 734 aa, Artificial Sequence
  source: /note="Description of Artificial Sequence: Synthetic polypeptide"
MAADGYLPDWLEDNLSEGIREWWALKPGVPQPKANQQHQDNRRGLVLPGYKYLGPGNGLDKGEPVNEADAAALEHDKAYDQQLKAGDNPYLKYNHADAEFQERLKEDTSFGGNLGRAVFQAKKRLLEPLGLVEEAAKTAPGKKRPVEQSPQEPDSSAGIGKSGAQPAKKRLNFGQTGDTESVPDPQPIGEPPAAPSGVGSLTMASGGGAPVADNNEGADGVGSSSGNWHCDSQWLGDRVITTSTRTWALPTYNNHLYKQISSQSGASNDNHYFGYSTPWGYFDFNRFHCHFSPRDWQRLINNNWGFRPKRLSFKLFNIQVKEVTDNNGVKTIANNLTSTVQVFTDSDYQLPYVLGSAHEGCLPPFPADVFMIPQYGYLTLNDGSQAVGRSSFYCLEYFPSQMLRTGNNFQFSYEFENVPFHSSYAHSQSLDRLMNPLIDQYLYYLSKTINGSGQNQQTLKFSVAGPSNMAVQGRNYIPGPSYRQQRVSTTVTQNNNSEFAWPGASSWALNGRNSLMNPGPAMASHKEGEDRFFPLSGSLIFGKQGTGRDNVDADKVMITNEEEIKTTNPVATESYGQVATNHQSAQAQAQTGWVQNQGILPGMVWQDRDVYLQGPIWAKIPHTDGNFHPSPLMGGFGMKHPPPQILIKNTPVPADPPTAFNKDKLNSFITQYSTGQVSVEIEWELQKENSKRWNPEIQYTSNYYKSTSVDFAVNTEGVYSEPRPIGTRYLTRNL

SEQ ID NO: 367 - DNA, 2217 bp, Artificial Sequence
  source: /note="Description of Artificial Sequence: Synthetic polynucleotide"
atggctgccgatggttatcttccagattggctcgaggacaacctctctgagggcattcgcgagtggtgggcgctgaaacctggagccccgaagcccaaagccaaccagcaaaagcaggacgacggccggggtctggtgcttcctggctacaagtacctcggacccttcaacggactcgacaagggggagcccgtcaacgcggcggacgcagcggccctcgagcacgacaaggcctacgaccagcagctgcaggcgggtgacaatccgtacctgcggtataaccacgccgacgccgagtttcaggagcgtctgcaagaagatacgtcttttgggggcaacctcgggcgagcagtcttccaggccaagaagcgggttctcgaacctctcggtctggttgaggaaggcgctaagacggctcctggaaagaagagaccggtagagccatcaccccagcgttctccagactcctctacgggcatcggcaagaaaggccaacagcccgccagaaaaagactcaattttggtcagactggcgactcagagtcagttccagaccctcaacctctcggagaacctccagcagcgccctctggtgtgggacctaatacaatggctgcaggcggtggcgcaccaatggcagacaataacgaaggcgccgacggagtgggtagttcctcgggaaattggcattgcgattccacatggctgggcgacagagtcatcaccaccagcacccgaacctgggccctgcccacctacaacaaccacctctacaagcaaatctccaacgggacatcgggaggagccaccaacgacaacacctacttcggctacagcaccccctgggggtattttgactttaacagattccactgccacttttcaccacgtgactggcagcgactcatcaacaacaactggggattccggcccaagagactcagcttcaagctcttcaacatccaggtcaaggaggtcacgcagaatgaaggcaccaagaccatcgccaataacctcaccagcaccatccaggtgtttacggactcggagtaccagctgccgtacgttctcggctctgcccaccagggctgcctgcctccgttcccggcggacgtgttcatgattccccagtacggctacctaacactcaacaacggtagtcaggccgtgggacgctcctccttctactgcctggaatactttccttcgcagatgctgagaaccggcaacaacttccagtttacttacaccttcgaggacgtgcctttccacagcagctacgcccacagccagagcttggaccggctgatgaatcctctgattgaccagtacctgtactacttgtctcggactcaaacaacaggaggcacggcaaatacgcagactctgggcttcagccaaggtgggcctaatacaatggccaatcaggcaaagaactggctgccaggaccctgttaccgccaacaacgcgtctcaacgacaaccgggcaaaacaacaatagcaactttgcctggactgctgggaccaaataccatctgaatggaagaaattcattggctaatcctggcatcgctatggcaacacacaaagacgacgaggagcgtttttttcccagtaacgggatcctgatttttggcaaacaaaatgctgccagagacaatgcggattacagcgatgtcatgctcaccagcgaggaagaaatcaaaaccactaaccctgtggctacagaggaatacggtatcgtggcagataacttgcagcagcaaaacacggctcctcaaattggaactgtcaacagccagggggccttacccggtatggtctggcagaaccgggacgtgtacctgcagggtcccatctgggccaagattcctcacacggacggcaacttccacccctctcccctcatgggtggattcggacttaaacatcctccgcctcagatcctgatcaagaacacgcctgtacctgcggatcctccgaccaccttcaaccagtcaaagctgaactctttcatcacgcaatacagcaccggacaggtcagcgtggaaattgaatgggagctgcagaaggaaaacagcaagcgctggaaccccgagatccagtacacctccaactactacaaatctacaagtgtggactttgctgttaatacagaaggcgtgtactctgaaccccgccccattggcacccgttacctcacccgtaatctgtaa

SEQ ID NO: 368 - protein, 738 aa, Artificial Sequence; identical to SEQ ID NO: 114
  source: /note="Description of Artificial Sequence: Synthetic polypeptide"

SEQ ID NO: 369 - DNA, 2211 bp, Artificial Sequence
  source: /note="Description of Artificial Sequence: Synthetic polynucleotide"
atggctgctgacggttatcttccagattggctcgaggacaacctttctgaaggcattcgagagtggtgggcgctgcaacctggagcccctaaacccaaggcaaatcaacaacatcaggacaacgctcggggtcttgtgcttccgggttacaaatacctcggacccggcaacggactcgacaagggggaacccgtcaacgcagcggacgcggcagccctcgagcacgacaaggcctacgaccagcagctcaaggccggtgacaacccctacctcaagtacaaccacgccgacgccgagttccaggagcggctcaaagaagatacgtcttttgggggcaacctcgggcgagcagtcttccaggccaaaaagaggcttcttgaacctcttggtctggttgaggaagcggctaagacggctcctggaaagaagaggcctgtagatcagtctcctcaggaaccggactcatcatctggtgttggcaaatcgggcaaacagcctgccagaaaaagactaaatttcggtcagactggcgactcagagtcagtcccagaccctcaacctctcggagaaccaccagcagcccccacaagtttgggatctaatacaatggcttcaggcggtggcgcaccaatggcagacaataacgagggtgccgatggagtgggtaattcctcaggaaattggcattgcgattcccaatggctgggcgacagagtcatcaccaccagcaccagaacctgggccctgcccacttacaacaaccatctctacaagcaaatctccagccaatcaggagcttcaaacgacaaccactactttggctacagcaccccttgggggtattttgactttaacagattccactgccacttctcaccacgtgactggcagcgactcattaacaacaactggggattccggcccaagaaactcagcttcaagctcttcaacatccaagttaaagaggtcacgcagaacgatggcacgacgactattgccaataaccttaccagcacggttcaggtgtttacggactcggagtatcagctcccgtacgtgctcgggtcggcgcaccaaggctgtctcccgccgtttccagcggacgtcttcatggtccctcagtatggatacctcaccctgaacaacggaagtcaagcggtgggacgctcatccttttactgcctggagtacttcccttcgcagatgctaaggactggaaataacttccaattcagctataccttcgaggatgtaccttttcacagcagctacgctcacagccagagtttggatcgcttgatgaatcctcttattgatcagtatctgtactacctgaacagaacgcaaggaacaacctctggaacaaccaaccaatcacggctgctttttagccaggctgggcctcagtctatgtctttgcaggccagaaattggctacctgggccctgctaccggcaacagagactttcaaagactgctaacgacaacaacaacagtaactttccttggacagcggccagcaaatatcatctcaatggccgcgactcgctggtgaatccaggaccagctatggccagtcacaaggacgatgaagaaaaatttttccctatgcacggcaatctaatatttggcaaagaagggacaacggcaagtaacgcagaattagataatgtaatgattacggatgaagaagagattcgtaccaccaatcctgtggcaacagagcagtatggaactgtggcaaataacttgcagagctcaaatacagctcccacgactagaactgtcaatgatcagggggccttacctggcatggtgtggcaagatcgtgacgtgtaccttcaaggacctatctgggcaaagattcctcacacggatggacactttcatccttctcctctgatgggaggctttggactgaaacatccgcctcctcaaatcatgatcaaaaatactccggtaccggcaaatcctccgacgactttcagcccggccaagtttgcttcatttatcactcagtactccactggacaggtcagcgtggaaattgagtgggagctacagaaagaaaacagcaaacgttggaatccagagattcagtacacttccaactacaacaagtctgttaatgtggactttactgtagacactaatggtgtttatagtgaacctcgccccattggcacccgttaccttacccgtcccctgtaa

SEQ ID NO: 370 - protein, 736 aa, Artificial Sequence; identical to SEQ ID NO: 340
  source: /note="Description of Artificial Sequence: Synthetic polypeptide"

SEQ ID NO: 371 - DNA, 2211 bp, Artificial Sequence; identical to SEQ ID NO: 339
  source: /note="Description of Artificial Sequence: Synthetic polynucleotide"

SEQ ID NO: 372 - protein, 736 aa, Artificial Sequence; identical to SEQ ID NO: 340
  source: /note="Description of Artificial Sequence: Synthetic polypeptide"

SEQ ID NO: 373 - DNA, 2211 bp, Artificial Sequence
  source: /note="Description of Artificial Sequence: Synthetic polynucleotide"
atggctgctgacggttatcttccagattggctcgaggacaacctttctgaaggcattcgtgagtggtgggctctgaaacctggagtccctcaacccaaagcgaaccaacaacaccaggacaaccgtcggggtcttgtgcttccgggttacaaatacctcggacccggtaacggactcgacaaaggagagcccgtcaacgcggcggatgcagcggccctcgagcacgacaaggcctacgaccagcagctcaaagcgggtgacaatccgtacctgcggtataaccacgccgacgccgagtttcaggagcgtctgcaagaagatacgtcttttgggggcaacctcgggcgagcagtcttccaggccaagaagagggttctcgaaccttttggtctggttgaggaaggtgctaagacggctcctggaaagaaacgtccggtagagcagtcgccacaagagccagactcctcctcgggcatcggcaagacaggccagcagcccgctaaaaagagactcaattttggtcagactggcgactcagagtcagtccccgacccacaacctctcggagaacctccagcaacccccgctgctgtgggacctactacaatggcttcaggcggtggcgcaccaatggcagacaataacgaaggcgccgacggagtgggtaatgcctcaggaaattggcattgcgattccacatggctgggcgacagagtcatcaccaccagcacccgcacctgggccttgcccacctacaataaccacctctacaagcaaatctccagtgcttcaacgggggccagcaacgacaaccactacttcggctacagcaccccctgggggtattttgatttcaacagattccactgccatttctcaccacgtgactggcagcgactcatcaacaacaattggggattccggcccaagagactcaacttcaagctcttcaacatccaagtcaaggaggtcacgacgaatgatggcgtcacgaccatcgctaataaccttaccagcacggttcaagtcttctcggactcggagtaccagcttccgtacgtcctcggctctgcgcaccagggctgcctccctccgttcccggcggacgtgttcatgattccgcaatacggctacctgacgctcaacaatggcagccaagccgtgggacgttcatccttttactgcctggaatatttcccttctcagatgctgagaacgggcaacaactttaccttcagctacacctttgaggaagtgcctttccacagcagctacgcgcacagccagagcctggaccggctgatgaatcctctcatcgaccaatacctgtattacctgaacagaactcaaaatcagtccggaagtgcccaaaacaaggacttgctgtttagccgtgggtctccagctggcatgtctgttcagcccaaaaactggctacctggaccctgttatcggcagcagcgcgtttctaaaacaaaaacagacaacaacaacagcaattttacctggactggtgcttcaaaatataacctcaatgggcgtgaatccatcatcaaccctggcactgctatggcctcacacaaagacgacgaagacaagttctttcccatgagcggtgtcatgatttttggaaaagagagcgccggagcttcaaacactgcattggacaatgtcatgattacagacgaagaggaaattaaagccactaaccctgtggccaccgaaagatttgggaccgtggcagtcaatttccagagcagcagcacagaccctgcgaccggagatgtgcatgttatgggagccttacctggaatggtgtggcaagacagagacgtatacctgcagggtcctatttgggccaaaattcctcacacggatggacactttcacccgtctcctctcatgggcggctttggacttaagcacccgcctcctcagatcctcatcaaaaacacgcctgttcctgcgaatcctccggcagagttttcggctacaaagtttgcttcattcatcacccagtattccacaggacaagtgagcgtggagattgaatgggagctgcagaaagaaaacagcaaacgctggaatcccgaagtgcagtatacatctaactatgcaaaatctgccaacgttgatttcactgtggacaacaatggactttatactgagcctcgccccattggcacccgttacctcacccgtcccctgtaa

SEQ ID NO: 374 - protein, 736 aa, Artificial Sequence
  source: /note="Description of Artificial Sequence: Synthetic polypeptide"
MAADGYLPDWLEDNLSEGIREWWALKPGVPQPKANQQHQDNRRGLVLPGYKYLGPGNGLDKGEPVNAADAAALEHDKAYDQQLKAGDNPYLRYNHADAEFQERLQEDTSFGGNLGRAVFQAKKRVLEPFGLVEEGAKTAPGKKRPVEQSPQEPDSSSGIGKTGQQPAKKRLNFGQTGDSESVPDPQPLGEPPATPAAVGPTTMASGGGAPMADNNEGADGVGNASGNWHCDSTWLGDRVITTSTRTWALPTYNNHLYKQISSASTGASNDNHYFGYSTPWGYFDFNRFHCHFSPRDWQRLINNNWGFRPKRLNFKLFNIQVKEVTTNDGVTTIANNLTSTVQVFSDSEYQLPYVLGSAHQGCLPPFPADVFMIPQYGYLTLNNGSQAVGRSSFYCLEYFPSQMLRTGNNFTFSYTFEEVPFHSSYAHSQSLDRLMNPLIDQYLYYLNRTQNQSGSAQNKDLLFSRGSPAGMSVQPKNWLPGPCYRQQRVSKTKTDNNNSNFTWTGASKYNLNGRESIINPGTAMASHKDDEDKFFPMSGVMIFGKESAGASNTALDNVMITDEEEIKATNPVATERFGTVAVNFQSSSTDPATGDVHVMGALPGMVWQDRDVYLQGPIWAKIPHTDGHFHPSPLMGGFGLKHPPPQILIKNTPVPANPPAEFSATKFASFITQYSTGQVSVEIEWELQKENSKRWNPEVQYTSNYAKSANVDFTVDNNGLYTEPRPIGTRYLTRPL

SEQ ID NO: 375 - DNA, 2217 bp, Artificial Sequence
  source: /note="Description of Artificial Sequence: Synthetic polynucleotide"
atggctgccgatggttatcttccagattggctcgaggacaacctctctgagggcattcgcgagtggtgggacttgaaacctggagccccgaaacccaaagccaaccagcaaaagcaggacgacggccggggtctggtgcttcctggctacaagtacctcggacccttcaacggactcgacaagggggagcccgtcaacgcggcggatgcaacggccctcgagcacgacaaggcctacgaccagcagctgcaggcgggtgacaatccgtacctgcggtataaccacgccgacgccgagtttcaggagcgtctgcaagaagatacgtcttttgggggcaacctcgggcgagcagtcttccaggccaagaagcgggttctcgaacctctcggtctggttgaggaaggcgctaagacggctcctggaaagaagagaccggtagagccatcaccccagcgttctccagactcctctacgggcatcggcaagaaaggccaacagcccgccagaaaaagactcaattttggtcagactggcgactcagagtcagttccagaccctcaacctctcggagaaccaccagcagcccccacaagtttgggatctaatacaatggcttcaggcggtggcgcaccaatggcagacaataacgagggtgccgatggagtgggtaattcctcaggaaattggcattgcgattcccaatggctgggcgacagagtcatcaccaccagcacccgcacctgggccttgcccacctacaataaccacctctacaagcaaatctccagtgcttcaacgggggccagcaacgacaaccactacttcggctacagcaccccctgggggtattttgactttaaccgcttccactgccacttctcgccaagagactggcaaagactcatcaacaacaattggggattccggcccaagagactcaacttcaaactcttcaacatccaagtcaaggaggtcacgacgaatgatggcgtcacgaccatcgccaataacctcaccagcaccatccaggtgtttacggactcggagtaccagctgccgtacgttctcggctctgcccaccagggctgcctgcctccgttcccggcggacgtgttcatgattccccagtatggatacctcaccctgaacaacggaagtcaagcggtgggacgctcatccttttactgcctggagtacttcccttcgcagatgctaaggactggaaataacttccaattcagctataccttcgaggatgtaccttttcacagcagctacgctcacagccagagtttggatcgcttgatgaatcctcttattgatcagtatctgtactacctgaacagaacgcaaggaacaacctctggaacaaccaaccaatcacggctgctttttagccaggctgggcctcagtctatgtctttgcaggccagaaattggctacctgggccctgctaccggcaacagagactttcaaagactgctaacgacaacaacaacagtaactttccttggacagcagccagcaaatatcatctcaatggccgcgactcgctggtgaatccaggaccagctatggccagtcacaaggacgatgaagaaaaatttttccctatgcacggcaatctaatatttggcaaagaagggacaacggcaagtaacgcagaattagataatgtaatgattacggatgaagaagagattcgtaccaccaatcctgtggcaacagagcagtatggaactgtggcaaataacttgcagagctcaaatacagctcccacgactagaactgtcaatgatcagggggccttacctggcatggtgtggcaagatcgtgacgtgtaccttcaggggcccatctgggcaaagattccacacacggacggacattttcacccctctcccctcatgggtggattcggacttaaacaccctcctccgcagattctcatcaagaacaccccggtacctgcgaatccttcgaccaccttcagtgcggcaaagtttgcttccttcatcacacagtactccacgggacaggtcagcgtggagatcgagtgggagctgcagaaggaaaacagcaagcgctggaacccggagatccagtacacttccaactattacaagtctaataatgttgaatttgctgttaatactgaaggtgtatatagtgaaccccgccccattggcaccagatacctgactcgtaatctgtaa

SEQ ID NO: 376 - protein, 738 aa, Artificial Sequence
  source: /note="Description of Artificial Sequence: Synthetic polypeptide"
MAADGYLPDWLEDNLSEGIREWWDLKPGAPKPKANQQKQDDGRGLVLPGYKYLGPFNGLDKGEPVNAADATALEHDKAYDQQLQAGDNPYLRYNHADAEFQERLQEDTSFGGNLGRAVFQAKKRVLEPLGLVEEGAKTAPGKKRPVEPSPQRSPDSSTGIGKKGQQPARKRLNFGQTGDSESVPDPQPLGEPPAAPTSLGSNTMASGGGAPMADNNEGADGVGNSSGNWHCDSQWLGDRVITTSTRTWALPTYNNHLYKQISSASTGASNDNHYFGYSTPWGYFDFNRFHCHFSPRDWQRLINNNWGFRPKRLNFKLFNIQVKEVTTNDGVTTIANNLTSTIQVFTDSEYQLPYVLGSAHQGCLPPFPADVFMIPQYGYLTLNNGSQAVGRSSFYCLEYFPSQMLRTGNNFQFSYTFEDVPFHSSYAHSQSLDRLMNPLIDQYLYYLNRTQGTTSGTTNQSRLLFSQAGPQSMSLQARNWLPGPCYRQQRLSKTANDNNNSNFPWTAASKYHLNGRDSLVNPGPAMASHKDDEEKFFPMHGNLIFGKEGTTASNAELDNVMITDEEEIRTTNPVATEQYGTVANNLQSSNTAPTTRTVNDQGALPGMVWQDRDVYLQGPIWAKIPHTDGHFHPSPLMGGFGLKHPPPQILIKNTPVPANPSTTFSAAKFASFITQYSTGQVSVEIEWELQKENSKRWNPEIQYTSNYYKSNNVEFAVNTEGVYSEPRPIGTRYLTRNL

SEQ ID NO: 377 - DNA, 2208 bp, Artificial Sequence
  source: /note="Description of Artificial Sequence: Synthetic polynucleotide"
atggctgccgatggttatcttccagattggctcgaggacaaccttagtgaaggaattcgcgagtggtgggacttgaaacctggagccccgaagcccaaagccaaccagcaaaagcaggacgacggccggggtctggtgcttcctggctacaagtacctcggacccttcaacggactcgacaagggggagcccgtcaacgcggcggacgcagcggccctcgagcacgacaaggcctacgaccagcagctcaaagcgggtgacaatccgtacctgcggtataaccacgccgacgccgagtttcaggagcgtctgcaagaagatacgtcttttgggggcaacctcgggcgagcagtcttccaggccaagaagcgggttctcgaacctctcggtctggttgaggaaggtgctaagacggctcctggaaagaaacgtccggtagagcagtcgccacaagagccagactcctcctcgggcattggcaagacaggccagcagcccgctaaaaagagactcaattttggtcagactggcgactcagagtcagtccccgacccacaacctctcggagaacctccagcaacccccgctgctgtgggacctactacaatggcttcaggcggtggcgcaccaatggcagacaataacgaaggcgccgacggagtgggtaatgcctcaggaaattggcattgcgattccacatggctgggcgacagagtcatcaccaccagcacccgaacctgggccctgcccacctacaacaaccacctctacaaacaaatttccagccaatcaggagcctcgaacgacaatcactactttggctacagcaccccttgggggtattttgatttcaacagattccactgccacttttcaccacgtgactggcagcgactcatcaacaacaattggggattccggcccaagagactcagcttcaagctcttcaacatccaggtcaaggaggtcacgcagaatgaaggcaccaagaccatcgccaataaccttaccagcacggttcaagtgtttacggactcggagtatcagctcccgtacgtgctcggctcggcgcatcaaggatgcctcccgccgttcccagcagacgtcttcatggtgccacagtatggatacctcaccctgaacaacgggagtcaggcagtaggacgctcttcattttactgcctggagtactttccttctcagatgctgcgtaccggaaacaactttaccttcagctacacttttgaggacgttcctttccacagcagctacgctcacagccagagtctggaccgtctcatgaatcctctgattgaccagtacctgtattacttgagcagaacaaacactccaagtggaaccaccacgcagtcaaggcttcagttttctcaggccggagcgagtgacattcgggaccagtctaggaactggcttcctggaccctgttaccgccagcagcgagtatcaaagacatctgcggataacaacaacagtgaatactcgtggactggagctaccaagtaccacctcaatggcagagactctctggtgaatccgggcccggccatggcaagccacaaggactatgaagaaaagttttttcctcagagcggggttctcatctttgggaagcaaggctcagagaaaacaaatgtggacattgaaaaggtcatgattacagacgaagaggaaatcaggacaaccaatcccgtggctacggagcagtatggttctgtatctaccaacctccagagaggcaacagacaagcagctaccgcagatgtcaacacacaaggcgttcttccaggcatggtctggcaggacagagatgtgtaccttcaggggcccatctgggcaaagattccacacacggacggacattttcacccgtctccgctgatgggcggctttggcctgaaacatcctccgcctcagatcctgatcaagaacacgcctgtacctgcggatcctccgaccaccttcaaccagtcaaagctgaactctttcatcactcagtattctactggccaagtcagcgtggagatcgagtgggagctgcagaaggaaaacagcaagcgctggaaccccgagatccagtacacctccaactactacaaatctacaagtgtggactttgctgttaatacagaaggcgtgtactctgaaccccgccccattggcacccgttacctcacccgtaatctgtaa

SEQ ID NO: 378 - protein, 735 aa, Artificial Sequence
  source: /note="Description of Artificial Sequence: Synthetic polypeptide"
MAADGYLPDWLEDNLSEGIREWWDLKPGAPKPKANQQKQDDGRGLVLPGYKYLGPFNGLDKGEPVNAADAAALEHDKAYDQQLKAGDNPYLRYNHADAEFQERLQEDTSFGGNLGRAVFQAKKRVLEPLGLVEEGAKTAPGKKRPVEQSPQEPDSSSGIGKTGQQPAKKRLNFGQTGDSESVPDPQPLGEPPATPAAVGPTTMASGGGAPMADNNEGADGVGNASGNWHCDSTWLGDRVITTSTRTWALPTYNNHLYKQISSQSGASNDNHYFGYSTPWGYFDFNRFHCHFSPRDWQRLINNNWGFRPKRLSFKLFNIQVKEVTQNEGTKTIANNLTSTVQVFTDSEYQLPYVLGSAHQGCLPPFPADVFMVPQYGYLTLNNGSQAVGRSSFYCLEYFPSQMLRTGNNFTFSYTFEDVPFHSSYAHSQSLDRLMNPLIDQYLYYLSRTNTPSGTTTQSRLQFSQAGASDIRDQSRNWLPGPCYRQQRVSKTSADNNNSEYSWTGATKYHLNGRDSLVNPGPAMASHKDYEEKFFPQSGVLIFGKQGSEKTNVDIEKVMITDEEEIRTTNPVATEQYGSVSTNLQRGNRQAATADVNTQGVLPGMVWQDRDVYLQGPIWAKIPHTDGHFHPSPLMGGFGLKHPPPQILIKNTPVPADPPTTFNQSKLNSFITQYSTGQVSVEIEWELQKENSKRWNPEIQYTSNYYKSTSVDFAVNTEGVYSEPRPIGTRYLTRNL

SEQ ID NO: 379 - DNA, 2214 bp, Artificial Sequence
  source: /note="Description of Artificial Sequence: Synthetic polynucleotide"
atggctgccgatggttatcttccagattggctcgaggacaacctctctgagggcattcgcgagtggtgggacttgaaacctggagccccgaaacccaaagccaaccagcaaaagcaggacgacggccggggtctggtgcttcctggctacaagtacctcggacccttcaacggactcgacaagggggagcccgtcaacgcggcggatgcagcggccctcgagcacgacaaggcctacgaccagcagctcaaagcgggtgacaatccgtacctgcggtataaccacgccgacgccgagtttcaggagcgtctgcaagaagatacgtcttttgggggcaacctcgggcgagcagtcttccaggccaagaagagggttctcgaaccttttggtctggttgaggaaggtgctaagacggctcctggaaagaaacgtccggtagagcagtcgccacaagagccagactcctcctcgggcattggcaagacaggccagcagcctgcaagaaaaagattgaattttggtcagactggagacgcagactcagtacctgacccccagcctctcggacagccaccagcagccccctctggtctgggaactaatacgatggctacaggcagtggcgcaccaatggcagacaataacgagggcgccgacggagtgggtaattcctcgggaaattggcattgcgattcccaatggctgggggacagagtcatcaccaccagcacccgaacctgggccctgcccacctacaacaatcacctctacaagcaaatctccaacagcacatctggaggatcttcaaatgacaacgcctacttcggctacagcaccccctgggggtattttgatttcaacagattccactgccatttctcaccacgtgactggcagcgactcatcaacaacaattggggattccggcccaagagactcaacttcaagctcttcaacatccaggtcaaggaggtcacgcagaatgaaggcaccaagaccatcgccaataacctcaccagcaccatccaggtgtttacggactcggagtaccagctgccgtacgttctcggctctgcccaccagggctgcctgcctccgttcccggcggacgtgttcatgattccccagtacggctacctaacactcaacaacggtagtcaggccgtgggacgctcctccttctactgcctggaatactttccttcgcagatgctgagaaccggcaacaacttccagtttacttacaccttcgaggacgtgcctttccacagcagctacgcccacagccagagcttggaccggctgatgaatcctctgattgaccagtacctgtactacttgtctcggactcaaacaacaggaggcacgacaaatacgcagactctgggcttcagccaaggtgggcctaatacaatggccaatcaggcaaagaactggctgccaggaccctgttaccgccagcagcgagtatcaaagacatttgcggataacaacaacagtgaatactcgtggactggagctaccaagtaccacctcaatggcagagactctctggtgaatccgggcccggccatggcaagccacaaggacgatgaagaaaagttttttcctcagagcggggttctcatctttgggaagcaaggctcagagaaaacaaatgtggacattgaaaaggtcatgattacagacgaagaggaaatcaggacaaccaatcccgtggctacggagcagtatggttctgtatctaccaacctccagagaggcaacagacaagcagctaccgcagatgtcaacacacaaggcgttcttccaggcatggtctggcaggacagagatgtgtaccttcaggggcccatctgggcaaagattccacacacggacggacattttcacccctctcccctcatgggtggattcggacttaaacaccctccgcctcagatcctgatcaagaacacgcctgtacccgcggatcctccgaccaccttcaaccagtcaaagctgaactctttcatcacccagtattctactggccaagtcagcgtggagatcgagtgggagctgcagaaggaaaacagcaagcgctggaaccccgagatccagtacacctccaactactacaaatctacaagtgtggactttgctgttaatacagaaggcgtgtactctgaaccccgccccattggcacccgttacctcacccgtaatctgtaa

SEQ ID NO: 380 - protein, 737 aa, Artificial Sequence
  source: /note="Description of Artificial Sequence: Synthetic polypeptide"
MAADGYLPDWLEDNLSEGIREWWDLKPGAPKPKANQQKQDDGRGLVLPGYKYLGPFNGLDKGEPVNAADAAALEHDKAYDQQLKAGDNPYLRYNHADAEFQERLQEDTSFGGNLGRAVFQAKKRVLEPFGLVEEGAKTAPGKKRPVEQSPQEPDSSSGIGKTGQQPARKRLNFGQTGDADSVPDPQPLGQPPAAPSGLGTNTMATGSGAPMADNNEGADGVGNSSGNWHCDSQWLGDRVITTSTRTWALPTYNNHLYKQISNSTSGGSSNDNAYFGYSTPWGYFDFNRFHCHFSPRDWQRLINNNWGFRPKRLNFKLFNIQVKEVTQNEGTKTIANNLTSTIQVFTDSEYQLPYVLGSAHQGCLPPFPADVFMIPQYGYLTLNNGSQAVGRSSFYCLEYFPSQMLRTGNNFQFTYTFEDVPFHSSYAHSQSLDRLMNPLIDQYLYYLSRTQTTGGTTNTQTLGFSQGGPNTMANQAKNWLPGPCYRQQRVSKTFADNNNSEYSWTGATKYHLNGRDSLVNPGPAMASHKDDEEKFFPQSGVLIFGKQGSEKTNVDIEKVMITDEEEIRTTNPVATEQYGSVSTNLQRGNRQAATADVNTQGVLPGMVWQDRDVYLQGPIWAKIPHTDGHFHPSPLMGGFGLKHPPPQILIKNTPVPADPPTTFNQSKLNSFITQYSTGQVSVEIEWELQKENSKRWNPEIQYTSNYYKSTSVDFAVNTEGVYSEPRPIGTRYLTRNL

SEQ ID NO: 381 - DNA, 2217 bp, Artificial Sequence
  source: /note="Description of Artificial Sequence: Synthetic polynucleotide"
atggctgccgatggttatcttccagattggctcgaggacactctctctgaaggaataagacagtggtgggcgctgaaacctggagccccgaagcccaaagccaaccagcaaaagcaggacgacggccggggtctggtgcttcctggctacaagtacctcggacccttcaacggactcgacaagggggagcccgtcaacgcggcggatgcagcggccctcgagcacgacaaggcctacgaccagcagctcaaagcgggtgacaatccgtacctgcggtataaccacgccgacgccgagtttcaggagcgtctgcaagaagatacgtcttttgggggcaacctcgggcgagcagtcttccaggccaagaagcgggttctcgaacctctcggtctggttgaggaaggcgctaagacggctcctggaaagaagagaccggtagagccatcaccccagcgttctccagactcctctacgggcatcggcaagaaaggccaacagcccgccagaaaaagactcaattttggtcagactggcgactcagagtcagttccagaccctcaacctctcggagaaccaccagcagcccccacaagtttgggatctaatacaatggcttcaggcggtggcgcaccaatggcagacaataacgagggtgccgatggagtgggtaattcctcaggaaattggcattgcgattcccaatggctgggcgacagagtcatcaccaccagcacccgcacctgggccttgcccacctacaataaccacctctacaagcaaatctccagtgcttcaacgggggccagcaacgacaaccactacttcggctacagcaccccctgggggtattttgactttaaccgcttccactgccacttctcgccaagagactggcaaagactcatcaacaacaattggggattccggcccaagagactcaacttcaaactcttcaacatccaagtcaaggaggtcacgacgaatgatggcgtcacgaccatcgccaataacctcaccagcaccatccaggtgtttacggactcggagtaccagctgccgtacgttctcggctctgcccaccagggctgcctgcctccgttcccggcggacgtgttcatgattccccagtatggatacctcaccctgaacaacggaagtcaagcggtgggacgctcatccttttactgcctggagtacttcccttcgcagatgctaaggactggaaataacttccaattcagctataccttcgaggatgtaccttttcacagcagctacgctcacagccagagtttggatcgcttgatgaatcctcttattgatcagtatctgtactacctgaacagaacgcaaggaacaacctctggaacaaccaaccaatcacggctgctttttagccaggctgggcctcagtctatgtctttgcaggccagaaattggctacctgggccctgctaccggcaacagagactttcaaagactgctaacgacaacaacaacagtaactttccttggacagcagccagcaaatatcatctcaatggccgcgactcgctggtgaatccaggaccagctatggccagtcacaaggacgatgaagaaaaatttttccctatgcacggcaatctaatatttggcaaagaagggacaacggcaagtaacgcagaattagataatgtaatgattacggatgaagaagagattcgtaccaccaatcctgtggcaacagagcagtatggaactgtggcaaataacttgcagagctcaaatacagctcccacgactagaactgtcaatgatcagggggccttacctggcatggtgtggcaagatcgtgacgtgtaccttcaggggcccatctgggcaaagattccacacacggacggacattttcacccctctcccctcatgggtggattcggacttaaacaccctcctccgcagattctcatcaagaacaccccggtacctgcgaatccttcgaccaccttcagtgcggcaaagtttgcttccttcatcacacagtactccacgggacaggtcagcgtggagatcgagtgggagctgcagaaggaaaacagcaagcgctggaacccggagatccagtacacttccaactattacaagtctaataatgttgaatttgctgttaatactgaaggtgtatatagtgaaccccgccccattggcaccagatacctgactcgtaatctgtaa

SEQ ID NO: 382 - protein, 738 aa, Artificial Sequence
  source: /note="Description of Artificial Sequence: Synthetic polypeptide"
MAADGYLPDWLEDTLSEGIRQWWALKPGAPKPKANQQKQDDGRGLVLPGYKYLGPFNGLDKGEPVNAADAAALEHDKAYDQQLKAGDNPYLRYNHADAEFQERLQEDTSFGGNLGRAVFQAKKRVLEPLGLVEEGAKTAPGKKRPVEPSPQRSPDSSTGIGKKGQQPARKRLNFGQTGDSESVPDPQPLGEPPAAPTSLGSNTMASGGGAPMADNNEGADGVGNSSGNWHCDSQWLGDRVITTSTRTWALPTYNNHLYKQISSASTGASNDNHYFGYSTPWGYFDFNRFHCHFSPRDWQRLINNNWGFRPKRLNFKLFNIQVKEVTTNDGVTTIANNLTSTIQVFTDSEYQLPYVLGSAHQGCLPPFPADVFMIPQYGYLTLNNGSQAVGRSSFYCLEYFPSQMLRTGNNFQFSYTFEDVPFHSSYAHSQSLDRLMNPLIDQYLYYLNRTQGTTSGTTNQSRLLFSQAGPQSMSLQARNWLPGPCYRQQRLSKTANDNNNSNFPWTAASKYHLNGRDSLVNPGPAMASHKDDEEKFFPMHGNLIFGKEGTTASNAELDNVMITDEEEIRTTNPVATEQYGTVANNLQSSNTAPTTRTVNDQGALPGMVWQDRDVYLQGPIWAKIPHTDGHFHPSPLMGGFGLKHPPPQILIKNTPVPANPSTTFSAAKFASFITQYSTGQVSVEIEWELQKENSKRWNPEIQYTSNYYKSNNVEFAVNTEGVYSEPRPIGTRYLTRNL

SEQ ID NO: 383 - DNA, 2208 bp, Artificial Sequence; identical to SEQ ID NO: 19
  source: /note="Description of Artificial Sequence: Synthetic polynucleotide"

SEQ ID NO: 384 - protein, 735 aa, Artificial Sequence [sequence omitted]

SEQ ID NO: 385 - DNA, 2208 bp, Artificial Sequence
  source: /note="Description of Artificial Sequence: Synthetic polynucleotide"
atggctgccgatggttatcttccagattggctcgaggacaacctctctgagggcattcgcgagtggtgggcgctgaaacctggagccccgaagcccaaagccaaccagcaaaagcaggacgacggccggggtctggtgcttcctggctacaagtacctcggacccttcaacggactcgacaagggggagcccgtcaacgcggcggacgccgcggccctcgagcacgacaaggcctacgaccagcagctgcaggcgggtgacaatccgtacctgcggtataaccacgccgacgccgagtttcaggagcgtctgcaagaagatacgtcttttgggggcaacctcgggcgagcagtcttccaggccaaaaagaggcttcttgaacctcttggtctggttgaggaagcagctaaaacggctcctggaaagaagaggcctgtagagcagtctcctcaggaaccggactcctccgcgggtattggcaaatcgggtgcacagcccgccaaaaagagactcaatttcggtcagactggcgactcagagtcagtcccagaccctcaacctctcggagaaccaccagcagcccccacaagtttgggatctaatacaatggcttcaggcggtggcgcaccaatggcagacaataacgaaggcgccgacggagtgggtaatgcctcaggaaattggcattgcgattccacatggctgggcgacagagtcatcaccaccagcacccgcacctgggccttgcccacctacagcaaccatctctacaagcaaatctccagccaatcaggagcttcaaacgacaacgactactttggctacagcaccccttgggggtattttgatttcaacagattccactgccacttttcaccacgtgactggcaaagactcatcaacaacaactggggattccgacccaagagactcaacttcaagctctttaacattcaagtcaaagaggtcacgcagaatgacggtacgacgacgattgccaataaccttaccagcacggttcaggtgtttactgactcggagtaccagctcccgtacgtcctcggctcggcgcatcaaggatgcctcccgccgttcccagcagacgtcttcatggtgccacagtatggatacctcaccctgaacaacgggagtcaggcagtaggacgctcttcattttactgcctggagtactttccttctcagatgctgcgtaccggaaacaactttaccttcagctacacttttgaggacgttcctttccacagcagctacgctcacagccagagtctggaccgtctcatgaatcctctcatcgaccagtacctgtattacttgagcagaacaaacactccaagtggaaccaccacgcagtcaaggcttcagttttctcaggccggagcgagtgacattcgggaccagtctaggaactggcttcctggaccctgttaccgccagcagcgagtatcaaagacatctgaggataacaacaacagtgaatactcgtggactggagctaccaagtaccacctcaatggcagagactctctggtgaatccgggcccggccatggcaagccacaaggacgatgaagaaaagttttttcctcagagcggggttctcatctttgggaagcaaggctcagagaaaacaaatgtggacattgaaaaggtcatgattacagacgaagaggaaatcaggacaaccaatcccgtggctacggagcagtatggttctgtatctaccaacctccagagaggcaacagacaagcagctaccgcagatgtcaacacacaaggcgttcttccaggcatggtctggcaggacagagatgtgtaccttcaggggcccatctgggcaaagattccacacacggacggacattttcacccctctcccctcatgggtggattcggacttaaacaccctcctccacagattctcatcaagaacaccccggtacctgcgaatccttcgaccaccttcagtgcggcaaagtttgcttccttcatcacacagtactccacgggacaggtcagcgtggagatcgagtgggagctgcagaaggaaaacagcaaacgctggaatcccgaaattcagtacacttccaactacaacaagtctgttaatgtggactttactgtggacactaatggcgtgtattcagagcctcgccccattggcaccagatacctgactcgtaatctgtaa

SEQ ID NO: 386 - protein, 735 aa, Artificial Sequence
  source: /note="Description of Artificial Sequence: Synthetic polypeptide"
MAADGYLPDWLEDNLSEGIREWWALKPGAPKPKANQQKQDDGRGLVLPGYKYLGPFNGLDKGEPVNAADAAALEHDKAYDQQLQAGDNPYLRYNHADAEFQERLQEDTSFGGNLGRAVFQAKKRLLEPLGLVEEAAKTAPGKKRPVEQSPQEPDSSAGIGKSGAQPAKKRLNFGQTGDSESVPDPQPLGEPPAAPTSLGSNTMASGGGAPMADNNEGADGVGNASGNWHCDSTWLGDRVITTSTRTWALPTYSNHLYKQISSQSGASNDNDYFGYSTPWGYFDFNRFHCHFSPRDWQRLINNNWGFRPKRLNFKLFNIQVKEVTQNDGTTTIANNLTSTVQVFTDSEYQLPYVLGSAHQGCLPPFPADVFMVPQYGYLTLNNGSQAVGRSSFYCLEYFPSQMLRTGNNFTFSYTFEDVPFHSSYAHSQSLDRLMNPLIDQYLYYLSRTNTPSGTTTQSRLQFSQAGASDIRDQSRNWLPGPCYRQQRVSKTSEDNNNSEYSWTGATKYHLNGRDSLVNPGPAMASHKDDEEKFFPQSGVLIFGKQGSEKTNVDIEKVMITDEEEIRTTNPVATEQYGSVSTNLQRGNRQAATADVNTQGVLPGMVWQDRDVYLQGPIWAKIPHTDGHFHPSPLMGGFGLKHPPPQILIKNTPVPANPSTTFSAAKFASFITQYSTGQVSVEIEWELQKENSKRWNPEIQYTSNYNKSVNVDFTVDTNGVYSEPRPIGTRYLTRNL

SEQ ID NO: 387 - DNA, 2208 bp, Artificial Sequence
  source: /note="Description of Artificial Sequence: Synthetic polynucleotide"
atggctgccgatggttatcttccagattggctcgaggacaacctctctgagggcattcgcgagtggtgggcgctgaaacctggagccccgaagcccaaagccaaccagcaaaagcaggacgacggccggggtctggtgcttcctggctacaagtacctcggacccttcaacggactcgacaagggggagcccgtcaacgcggcggacgcagcggccctcgagcacgacaaggcctacgaccagcagctgcaggcgggtgacaatccgtacctgcggtataaccacgccgacgccgagttccaggagcgtctgcaagaagatacgtcttttgggggcaacctcgggcgagcagtcttccaggccaagaagagggttctcgaaccttttggtctggttgaggaaggtgctaagacggctcctggaaagaaacgtccggtagagcagtcgccacaagagccagactcctcctcgggcattggcaagacaggccagcagcccgctaaaaagagactcaattttggtcagactggcgactcagagtcagtcccagaccctcaacctctcggagaaccaccagcagcccccacaagtttgggatctaatacaatggcttcaggcggtggcgcaccaatggcagacaataacgagggcgccgacggagtgggtaattcctcgggaaattggcattgcgattccacatggatgggcgacagagtcatcaccaccagcacccgaacctgggccctgcccacctacaacaaccacctctacaaacaaatttccagccaatcaggagcttcaaacgacaaccactactttggctacagcaccccttgggggtattttgactttaacagattccactgccacttttcaccacgtgactggcagcgactcattaacaacaactggggattccggcccaagaaactcaacttcaagctctttaacatccaggtcaaggaggtcacgcagaatgaaggcaccaagaccatcgccaataacctcaccagcaccatccaggtgtttacggactcggagtaccagctgccgtacgttctcggctctgcccaccagggctgcctgcctccgttcccggcggacgtgttcatgattccccagtacggctacctaacactcaacaacggtagtcaggccgtgggacgctcctccttctactgcctggaatactttccttcgcagatgctgagaaccggcaacaacttccagtttacttacaccttcgaggacgtgcctttccacagcagctacgcccacagccagagcttggaccggctgatgaatcctctgattgaccagtacctgtattacttgtctcggactcaaacaacaggaggcacgacaaatacgcagactctgggcttcagccaaggtgggcctaatacaatggccaatcaggcaaagaactggctgcctggaccctgttaccgccagcagcgagtatcaaagacatctgcggataacaacaacagtgaatactcgtggactggagctaccaagtaccacctcaatggcagagactctctggtgaatccgggcccggccatggcaagccacaaggacgatgaagaaaagttttttcctcagagcggggttctcatctttgggaagcaaggctcagagaaaacaaatgtggacattgaaaaggttatgattacagacgaagaggaaatcaggacaaccaatcccgtggctacggagcagtatggttctgtatctaccaacctccagagaggcaacagacaagcagctaccgcagatgtcaacacacagggcgttcttccaggcatggtctggcaggacagagatgtgtaccttcagggtcccatttgggccaaaattcctcacacagatggacactttcacccgtcccctcttatgggcggctttggactcaagaacccgcctcctcagatcctcatcaaaaacacgcctgttcctgcgaatcctccggcagagttttcagctacaaagtttgcttcattcatcacccaatactccacaggacaagtgagtgtggaaattgaatgggagctgcagaaagaaaacagcaagcgctggaatcccgaagtgcagtacacatccaattatgcaaaatctgccaacgttgattttactgtggacactaatggcgtgtattcagagcctcgccccattggcaccagatacctcacccgtaatctgtaa

SEQ ID NO: 388 - protein, 735 aa, Artificial Sequence
  source: /note="Description of Artificial Sequence: Synthetic polypeptide"
MAADGYLPDWLEDNLSEGIREWWALKPGAPKPKANQQKQDDGRGLVLPGYKYLGPFNGLDKGEPVNAADAAALEHDKAYDQQLQAGDNPYLRYNHADAEFQERLQEDTSFGGNLGRAVFQAKKRVLEPFGLVEEGAKTAPGKKRPVEQSPQEPDSSSGIGKTGQQPAKKRLNFGQTGDSESVPDPQPLGEPPAAPTSLGSNTMASGGGAPMADNNEGADGVGNSSGNWHCDSTWMGDRVITTSTRTWALPTYNNHLYKQISSQSGASNDNHYFGYSTPWGYFDFNRFHCHFSPRDWQRLINNNWGFRPKKLNFKLFNIQVKEVTQNEGTKTIANNLTSTIQVFTDSEYQLPYVLGSAHQGCLPPFPADVFMIPQYGYLTLNNGSQAVGRSSFYCLEYFPSQMLRTGNNFQFTYTFEDVPFHSSYAHSQSLDRLMNPLIDQYLYYLSRTQTTGGTTNTQTLGFSQGGPNTMANQAKNWLPGPCYRQQRVSKTSADNNNSEYSWTGATKYHLNGRDSLVNPGPAMASHKDDEEKFFPQSGVLIFGKQGSEKTNVDIEKVMITDEEEIRTTNPVATEQYGSVSTNLQRGNRQAATADVNTQGVLPGMVWQDRDVYLQGPIWAKIPHTDGHFHPSPLMGGFGLKNPPPQILIKNTPVPANPPAEFSATKFASFITQYSTGQVSVEIEWELQKENSKRWNPEVQYTSNYAKSANVDFTVDTNGVYSEPRPIGTRYLTRNL

SEQ ID NO: 389 - DNA, 2214 bp, Artificial Sequence; identical to SEQ ID NO: 379
  source: /note="Description of Artificial Sequence: Synthetic polynucleotide"

SEQ ID NO: 390 - protein, 737 aa, Artificial Sequence; identical to SEQ ID NO: 380
  source: /note="Description of Artificial Sequence: Synthetic polypeptide"

SEQ ID NO: 391 - DNA, 2196 bp, Artificial Sequence
  source: /note="Description of Artificial Sequence: Synthetic polynucleotide"
atggctgctgacggttatcttccagattggctcgaggacaacctctctgagggcattcgcgagtggtgggcgctgaaacctggagccccgcaacccaaagccaaccagcaaaagcaggacgacggccggggtctggtgcttcctggctacaagtacctcggacccttcaacggactcgacaagggggagcccgtcaacgaggcggacgccgcggccctcgagcacgacaaggcctacgaccagcagctcaaagcgggtgacaatccgtacctgcggtataatcacgccgacgccgagtttcaagagcgtctgcaagaagatacgtcctttgggggcaacctcgggcgagcagtcttccaggccaaaaagagggtactcgagcctctgggtctggttgaggaaggcgctaagacggctcctggaaagaagcggccagtagaaccggactccagctcgggcatcggcaagtcaggccagcagcccgcgaaaaagagactgaattttgggcagactggcgactcagagtcagtgcctgacccccaacctctctcagaaccacccgcaggtccctctggtctgggatctggtacaatggctgctggcggtggcgctccaatggcagacaataacgaaggcgccgacggagtgggtaatgtctcaggaaattggcattgcgattccacatggctgggcgaccgagtcatcaccaccagcactcggacctgggccctccccacctacaacaaccacctctacaagcaaatctccaacgggacctcgggaggcagcagcaacgacaacacctactttggctacagcaccccctgggggtattttgactttaacagattccactgccacttttcaccacgtgactggcagcgactcatcaacaacaactgggggttccggcccaagaagctcaacttcaagctcttcaacatccaggtcaaggaggtcacccagaatgaaggcaccaagaccatcgccaataacctcaccagcacggtgcaggtctttacggactcggagtaccagctcccgtacgtgctcggctctgcccaccagggctgcctgcctccgttcccggcggacgtgttcatgattccgcagtacgggtacctgacgctgaacaacgggagccaggccgtggggcgatcctccttctactgcctggagtactttccctcgcagatgctgagaacgggcaacaactttaccttcagctacaccttcgaggacgtgcccttccacagcagctacgcgcacagccagagcctggaccggctgatgaacccgctgattgaccagtacctgtactacctgtctcggactcagaccaacgggaccaatgccacgcagactctgttgtttgctcaggccgggcctcagaacatgtcggctcaggccaagaactggctgcctggtccttgctatcggcagcagcgcgtctctacgacagtgtcgcaaaacaacaacagcaactttacctggaccggggcgaccaagtaccacctgaacggccgagactccctggtgagccccggtgtcgccatggcaacgcacaaggacgacgaggagcgcttcttcccgagcagcggggtcctgatgtttggcaagcagggcgctggaaaggacaatgtcgagtacaccaacgtgatgctcaccagcgaggaggagatcaagaccaccaaccctgtggccacggagcagtacggcgtggtggctgacaatctgcagcagaccaactcagctcccattgtgggggcagtcaacagccagggggccttacccggtatggtctggcagaaccgggacgtgtacctgcagggtcccatctgggccaagatcccgcatacggacggcaactttcacccgtctcctctcatgggcggctttggactgaaacacccgcctccccagatcctgatcaaaaacacgccggtacctgcggatcccccggtgaactttacggacgctaagctggcgagtttcatcacgcagtacagcaccgggcaggtcagcgtggagattgagtgggagctgcagaaggagaacagcaagcgctggaatcccgagattcagtacacttccaattattataaatcagctaatgtggactttgccgtcaatgcagatggtgtatatagtgaaccccgccccattggcactcgttacctcacccgtaatctgtaa

SEQ ID NO: 392 - protein, 731 aa, Artificial Sequence
  source: /note="Description of Artificial Sequence: Synthetic polypeptide"
MAADGYLPDWLEDNLSEGIREWWALKPGAPQPKANQQKQDDGRGLVLPGYKYLGPFNGLDKGEPVNEADAAALEHDKAYDQQLKAGDNPYLRYNHADAEFQERLQEDTSFGGNLGRAVFQAKKRVLEPLGLVEEGAKTAPGKKRPVEPDSSSGIGKSGQQPAKKRLNFGQTGDSESVPDPQPLSEPPAGPSGLGSGTMAAGGGAPMADNNEGADGVGNVSGNWHCDSTWLGDRVITTSTRTWALPTYNNHLYKQISNGTSGGSSNDNTYFGYSTPWGYFDFNRFHCHFSPRDWQRLINNNWGFRPKKLNFKLFNIQVKEVTQNEGTKTIANNLTSTVQVFTDSEYQLPYVLGSAHQGCLPPFPADVFMIPQYGYLTLNNGSQAVGRSSFYCLEYFPSQMLRTGNNFTFSYTFEDVPFHSSYAHSQSLDRLMNPLIDQYLYYLSRTQTNGTNATQTLLFAQAGPQNMSAQAKNWLPGPCYRQQRVSTTVSQNNNSNFTWTGATKYHLNGRDSLVSPGVAMATHKDDEERFFPSSGVLMFGKQGAGKDNVEYTNVMLTSEEEIKTTNPVATEQYGVVADNLQQTNSAPIVGAVNSQGALPGMVWQNRDVYLQGPIWAKIPHTDGNFHPSPLMGGFGLKHPPPQILIKNTPVPADPPVNFTDAKLASFITQYSTGQVSVEIEWELQKENSKRWNPEIQYTSNYYKSANVDFAVNADGVYSEPRPIGTRYLTRNL

SEQ ID NO: 393 - DNA, 2196 bp, Artificial Sequence
  source: /note="Description of Artificial Sequence: Synthetic polynucleotide"
atggctgctgacggttatcttccagattggctcgaggacaacctctctgagggcattcgcgagtggtgggcgctgaaacctggagccccgcaacccaaagccaaccagcaaaagcaggacgacggccggggtctggtgcttcctggctacaagtacctcggacccttcaacggactcgacaagggggagcccgtcaacgaggcggacgccgcggccctcgagcacgacaaggcctacgaccagcagctcaaagcgggtgacaatccgtacctgcggtataatcacgccgacgccgagtttcaagagcgtctgcaagaagatacgtcctttgggggcaacctcgggcgagcagtcttccaggccaaaaagagggtactcgagcctctgggtctggttgaggaaggcgctaagacggctcctggaaagaagcggccagtagaaccggactccagctcgggcatcggcaagtcaggccggcagcccgcgaaaaagagactgaattttgggcagactggcgactcagagtcagtgcctgacccccaacctctctcagaaccacccgcaggtccctctggtctgggatctggtacaatggctgcaggcggtggcgctccaatggcagacaataacgaaggcgccgacggagtgggtaatgcctcaggaaattggcattgcgattccacatggctgggcgaccgagtcatcaccaccagcactcggacctgggccctccccacctacaacaaccacctctacaagcaaatctccaacgggacctcgggaggcagcagcaacgacaacacctactttggctacagcaccccctgggggtattttgactttaacagattccactgccacttttcaccacgtgactggcagcgactcatcaacaacaactggggattccggcccaagaggctcaacttcaagctcttcaacatccaggtcaaggaggtcacccagaatgaaggcaccaagaccatcgccaataacctcaccagcacggtgcaggtctttacggactcgaagtaccagctcccgtacgtgctcggctctgcccaccagggctgcctgcctccgttcccggcggacgtgttcatgattccgcagtacgggtacctgacgctgaacaacgggagccaggccgtggggcgatcctccttctactgcctggagtactttccctcgcagatgctgagaacgggcaacaactttaccttcagctacaccttcgaggacgtgcccttccacagcagctacgcgcacagccagagcctggaccggctgatgaacccgctgattgaccagtacctgtactacctgtctcggactcagaccaacgggaccaatgccacgcagactctgttgtttgctcaggccgggcctcagaacatgtcggctcaggccaagaactggctgcctggtccttgctatcggcagcagcgcgtctctacgacagtgtcgcaaaacaacaacagcaactttacctggaccggggcgaccaagtaccacctgaacggccgagactccctggtgaaccccggtgtcgccatggcaacgcacaaggacgacgaggagcgcttcttcccgagcagcggggtcctgatgtttggcaagcagggcgctggaaaggacaatgtcgagtacaccaacgtgatgctcaccagcgaggaggagatcaagaccaccaaccctgtggccacggagcagtacggtgtggtggctgacaatctgcagcagaccaactcggctcccattgtgggggcagtcaacagccagggggccttacccggtatggtctggcagaaccgggacgtgtacctgcagggtcccatctgggccaagatcccgcatacggacggcaactttcacccgtctcctctcatgggcggctttggactgaaacacccgcctccccagatcctgatcaaaaacacgccggtacctgcggatcccccggtgaactttacggacgctaagctggcgagtttcatcacgcagtacagcaccgggcaggtcagcgtggagattgagtgggagctgcagaaggagaacagcaagcgctggaatcccgagattcagtacacttccaattattataaatcagctaatgtggactttgccgtcaatgcagatggtgtatatagtgaaccccgccccattggcactcgttacctcacccgtaatctgtaa

SEQ ID NO: 394 - protein, 731 aa, Artificial Sequence
  source: /note="Description of Artificial Sequence: Synthetic polypeptide"
MAADGYLPDWLEDNLSEGIREWWALKPGAPQPKANQQKQDDGRGLVLPGYKYLGPFNGLDKGEPVNEADAAALEHDKAYDQQLKAGDNPYLRYNHADAEFQERLQEDTSFGGNLGRAVFQAKKRVLEPLGLVEEGAKTAPGKKRPVEPDSSSGIGKSGRQPAKKRLNFGQTGDSESVPDPQPLSEPPAGPSGLGSGTMAAGGGAPMADNNEGADGVGNASGNWHCDSTWLGDRVITTSTRTWALPTYNNHLYKQISNGTSGGSSNDNTYFGYSTPWGYFDFNRFHCHFSPRDWQRLINNNWGFRPKRLNFKLFNIQVKEVTQNEGTKTIANNLTSTVQVFTDSKYQLPYVLGSAHQGCLPPFPADVFMIPQYGYLTLNNGSQAVGRSSFYCLEYFPSQMLRTGNNFTFSYTFEDVPFHSSYAHSQSLDRLMNPLIDQYLYYLSRTQTNGTNATQTLLFAQAGPQNMSAQAKNWLPGPCYRQQRVSTTVSQNNNSNFTWTGATKYHLNGRDSLVNPGVAMATHKDDEERFFPSSGVLMFGKQGAGKDNVEYTNVMLTSEEEIKTTNPVATEQYGVVADNLQQTNSAPIVGAVNSQGALPGMVWQNRDVYLQGPIWAKIPHTDGNFHPSPLMGGFGLKHPPPQILIKNTPVPADPPVNFTDAKLASFITQYSTGQVSVEIEWELQKENSKRWNPEIQYTSNYYKSANVDFAVNADGVYSEPRPIGTRYLTRNL

SEQ ID NO: 395 - DNA, 2196 bp, Artificial Sequence
  source: /note="Description of Artificial Sequence: Synthetic polynucleotide"
atggctgctgacggttatcttccagattggctcgaggacaacctctctgagggcattcgcgagtggtgggcgctgaaacctggagccccgcaacccaaagccaaccagcaaaagcaggacgacggccggggtctggtgcttcctggctacaagtacctcggacccttcaacggactcgacaagggggagcccgtcaacgaggcggacgccgcggccctcgagcacgacaaggcctacgaccagcagctcaaagcgggtgacaatccgtacctgcggtataatcacgccgacgccgagtttcaagagcgtctgcaagaagatacgtcctttgggggcaacctcgggcgagcagtcttccaggccaaaaagagggtactcgagcctctgggtctggttgaggaaggcgctaagacggctcctggaaagaagcggccagtagaaccggactccagctcgggcatcggcaagtcaggccagcagcccgcgaaaaagagactgaattttgggccgactggcgactcagagtcagtgcctgacccccaacctctctcagaaccacctgcaggtccctctggtctgggatctggtacaatggctgcaggcggtggcgctccaatggcagacaataacgaaggcgccgacggagtgggtaatgtctcaggaaattggcattgcgattccacatggctgggcgaccgagtcatcaccaccagcactcggacctgggccctccccacctacaacaaccacctctacaagcaaatctccaacgggacctcgggaggcagcagcaacgacaacacctactttggctacagcaccccctgggggtattttgactttaacagattccactgccacttttcaccacgcgactggcagcgactcatcaacaacaactggggattccggcccaagaagctcaacttcaagctcttcaacatccaggtcaaggaggtcacccagaatgaaggcaccaagaccaccgccaataacctcaccagcacggtgcaggtctttacggactcggagtaccagctcccgtacgtgctcggctctgcccaccagggctgcctgcctccgttcccggcggacgtgttcatgattccgcagtacgggtacctgacgctgaacaacgggagccaggccgtggggcgatcctccttctactgcctggagtactttccctcgcagatgctgagaacgggcaacaactttaccttcagctacaccttcgaggacgtgcccttccacagcagctacgcgcacagccagagcctggaccggctgatgaacccgctgattgaccagtacctgtactacctgtctcggactcagaccaacgggaccaatgccacgcagactctgttgtttgctcaggccgggcctcagaacatgtcggctcaggccaagaactggctgcctggtccttgctatcggcagcagcgcgtctctacggcagtgtcgcaaaacaacaacagcaactttacctggaccggggcgaccaagtaccacctgaacggccgagactccctggtgaaccccggtgtcgccatggcaacgcacaaggacgacgaggagcgcttcttcccgagcagcggggtcctgatgtttggcaagcagggcgctggaaaggacaatgtcgagtacaccaacgtgatgctcaccagcgaggaggagatcaagaccaccaaccctgtggccacggagcagtacggtgtggtggctgacaatctgcagcagaccaactcggctcccattgtgggggcagtcaacagccagggggccttacccggtatggtctggcagaaccgggacgtgtacctgcagggtcccatctgggccaagatcccgcatacggacggcaactttcacccgtctcctctcatgggcggctttggactgaaacacccgcctccccagatcctgatcaaaaacacgccggtacctgcggatcccccggtgaactttacggacgctaagctggcgagtttcatcacgcagtacagcaccgggcaggtcagcgtggagattgagtgggagctgcagaaggagaacagcaagcgctggaatcccgagattcagtacacttccaattattataaatcagctaatgtggactttgccgtcaatgcagatggtgtatatagcgaaccccgccccattggcactcgttacctcacccgtaatctgtaa

SEQ ID NO: 396 - protein, 731 aa, Artificial Sequence
  source: /note="Description of Artificial Sequence: Synthetic polypeptide"
MAADGYLPDWLEDNLSEGIREWWALKPGAPQPKANQQKQDDGRGLVLPGYKYLGPFNGLDKGEPVNEADAAALEHDKAYDQQLKAGDNPYLRYNHADAEFQERLQEDTSFGGNLGRAVFQAKKRVLEPLGLVEEGAKTAPGKKRPVEPDSSSGIGKSGQQPAKKRLNFGPTGDSESVPDPQPLSEPPAGPSGLGSGTMAAGGGAPMADNNEGADGVGNVSGNWHCDSTWLGDRVITTSTRTWALPTYNNHLYKQISNGTSGGSSNDNTYFGYSTPWGYFDFNRFHCHFSPRDWQRLINNNWGFRPKKLNFKLFNIQVKEVTQNEGTKTTANNLTSTVQVFTDSEYQLPYVLGSAHQGCLPPFPADVFMIPQYGYLTLNNGSQAVGRSSFYCLEYFPSQMLRTGNNFTFSYTFEDVPFHSSYAHSQSLDRLMNPLIDQYLYYLSRTQTNGTNATQTLLFAQAGPQNMSAQAKNWLPGPCYRQQRVSTAVSQNNNSNFTWTGATKYHLNGRDSLVNPGVAMATHKDDEERFFPSSGVLMFGKQGAGKDNVEYTNVMLTSEEEIKTTNPVATEQYGVVADNLQQTNSAPIVGAVNSQGALPGMVWQNRDVYLQGPIWAKIPHTDGNFHPSPLMGGFGLKHPPPQILIKNTPVPADPPVNFTDAKLASFITQYSTGQVSVEIEWELQKENSKRWNPEIQYTSNYYKSANVDFAVNADGVYSEPRPIGTRYLTRNL

SEQ ID NO: 397 - DNA, 4404 bp, Artificial Sequence
  source: /note="Description of Artificial Sequence: Synthetic polynucleotide"
atggctgccgatggttatcttccagattggctcgagggcaacctctctgagggcattcgcgagtggtgggacttgaaacctggagccccgaaacccaaagccaaccagcaaaagcaggacgacggccggggtctggtgcttcctggctacaggtacctcggacccttcaacggactcgacaagggagagccggtcaacgaggcagacgccgcggccctcgagcacgacaaggcctacgacaagcagctcgagcagggggacaacccgtacctcaagtacaaccacgccgacgccgagtttcaggagcgtcttcaagaagatacgtcttttgggggcaacctcgggcgagcagtcttccaggccaagaagcgggttctcgaacctctcggtctggttgaggaaggcgctaagacggctcctggaaagaagagacccatagaatcccccgactcctccacgggcatcggcaagaacggccagccgcccgctaaaaagaagctcaactttgggcagactggcgactcagagtcagtgcccgacccccaacctctcggagaacctcccgccgcgccctcaggtctgggatctggtacaatggctgcaggcggtggcgcaccaatggcagacaataacgaaggcgccgacggagtgggtaatgcctccggaaattggcattgcgattccacatggctgggcgacagagtcatcaccaccagcacccgcacctgggccctgcccacctacaacaaccacctctacaagcagatatcaagtcagagcggggctaccaacgacaaccacttcttcggctacagcaccccctggggctattttgacttcaacagattccactgccacttctcaccacgtgactggcagcgactcatcaacaacaactggggattccggcccagaaagctgcggttcaagttgttcaacatccaggtcaaggaggtcacgacgaacgacggcgttacgaccatcgctaataaccttaccagcacgattcaggtcttctcggactcggagtaccaactgccgtacgtcctcggctctgcgcaccagggctgcctccctccgttccctgcggacgtgttcatgattcctcagtacggatatctgactctaaacaacggcagtcagtctgtgggacgttcctccttctactgcctggagtactttccttctcagatgctgagaacgggcgataactttgaattcagctacacctttgaggaagtgcctttccacagcagctatgcgcacagccagagcctggaccggctgatgaatcccctcatcgaccagtacctgtactacctggcccggacccagagcactacggggtccacaagggagctgcagttccatcaggctgggcccaacaccatggccgagcaatcaaagaactggctgcccggaccctgttatcggcagcagagactgtcaaaaaacatagacagcaacaacaacagtaactttgcctggaccggggccactaaataccatctgaatggtagaaattcattaaccaacccgggcgtagccatggccaccaacaaggacgacgaggaccagttctttcccatcaacggagtgctggtttttggcaaaacgggggctgccaacaagacaacgctggaaaacgtgctaatgaccagcgaggaggagatcaaaaccaccaatcccgtggctacagaagaatacggtgtggtctccagcaacctgcaatcgtctacggccggaccccagacacagactgtcaacagccagggggctctgcccggcatggtctggcagaaccgggacgtgtacctgcagggtcccatctgggccaaaattcctcacacggacggcaactttcacccgtctcccctgatgggcggatttggactcaaacacccgcctcctcaaattctcatcaaaaacaccccggtacctgctaatcctccagaggtgtttactcctgccaagtttgcctcatttatcacgcagtacagcaccggccaggtcagcgtggagatcgagtgggaactgcagaaagaaaacagcaaacgctggaatccagagattcagtacacctcaaattatgccaagtctaataatgtggaatttgctgtcaacaacgaaggggtttatactgagcctcgccccattggcacccgttacctcacccgtaacctgtaaatggctgccgatggttatcttccagattggctcgaggacaacctctctgagggcattcgcgagtggtgggacttgaaacctggagccccgaaacccaaagccaaccagcaaaagcaggacgacggccggggtctggtgcttcctggctacaagtacctcggacccttcaacggactcgacaagggggagcccgtcaacgcggcggacgcagcggccctcgagcacgacaaggcctacgaccagcagctcaaagcgggtgacaatccgtacctgcggtataaccacgccgacgccgagtttcaggagcgtctgcaagaagatacgtcttttgggggcaacctcgggcgagcagtcttccaggccaagaagcgggttctcgaacctctcggtctggttgaggaaggcgctaagacggctcctggaaagaagagaccggtagagccatcaccccagcgttctccagactcctctacgggcatcggcaagaaaggccagcagcccgcgaaaaagagactcaactttgggcagactggcgactcagagtcagtgcccgaccctcaaccaatcggagaaccccccgcaggcccctctggtctgggatctggtacaatggctgcaggcggtggcgctccaatggcagacaataacgaaggcgccgacggagtgggtagttcctcaggaaattggcattgcgattccacatggctgggcgacagagtcatcaccaccagcacccgaacctgggccctccccacctacaacaaccacctctacaagcaaatctccaacgggacttcgggaggaagcaccaacgacaacacctacttcggctacagcaccccctgggggtattttgactttaacagattccactgccacttctcaccacgtgactggcagcgactcatcaacaacaactggggattccggcccaagagactcaacttcaagctcttcaacatccaggtcaaggaggtcacgcagaatgaaggcaccaagaccatcgccaataaccttaccagcacgattcaggtctttacggactcggaataccagctcccgtacgtcctcggctctgcgcaccagggctgcctgcctccgttcccggcggacgtcttcatgattcctcagtacgggtacctgactctgaacaatggcagtcaggccgtgggccgttcctccttctactgcctggagtactttccttctcaaatgctgagaacgggcaacaactttgagttcagctaccagtttgaggacgtgccttttcacagcagctacgcgcacagccaaagcctggaccggctgatgaaccccctcatcgaccagtacctgtactacctgtctcggactcagtccacgggaggtaccgcaggaactcagcagttgctattttctcaggccgggcctaataacatgtcggctcaggccaaaaactggctacccgggccctgctaccggcagcaacgcgtctccacgacactgtcgcaaaataacaacagcaactttgcctggaccggtgccaccaagtatcatctgaatggcagagactctctggtaaatcccggtgtcgctatggcaacccacaaggacgacgaagagcgattttttccgtccagcggagtcttaatgtttgggaaacagggagctggaaaagacaacgtggactatagcagcgttatgctaaccagtgaggaagaaattaaaaccaccaacccagtggccacagaacagtacggcgtggtggccgataacctgcaacagcaaaacgccgctcctattgtaggggccgtcaacagtcaaggagccttacctggcatggtctggcagaaccgggacgtgtacctgcagggtcctatctgggccaagattcctcacacggacggaaactttcatccctcgccgctgatgggaggctttggactgaaacacccgcctcctcagatcctgattaagaatacacctgttcccgcggatcctccaactaccttcagtcaagctaagctggcgtcgttcatcacgcagtacagcaccggacaggtcagcgtggaaattgaatgggagctgcagaaagaaaacagcaaacgctggaacccagagattcaatacacttccaactactacaaatctacaaatgtggactttgctgttaacacagatggcacttattctgagcctcgccccatcggcacccgttacctcacccgtaatctgtaa

SEQ ID NO: 398 - protein, 738 aa, Artificial Sequence; identical to SEQ ID NO: 16
  source: /note="Description of Artificial Sequence: Synthetic polypeptide"

SEQ ID NO: 399 - DNA, 3129 bp, Artificial Sequence
  source: /note="Description of Artificial Sequence: Synthetic polynucleotide"
gaattcgccctttctacggctgcgtcaactggaccaatgagaactttcccttcaacgattgcgtcgacaagatggtgatctggtgggaggagggcaagatgacggccaaggtcgtggagtccgccaaggccattctcggcggcagcaaagtgcgcgtggaccaaaagtgcaagtcgtccgcccagatcgaccccacccccgtgatcgtcacctccaacaccaacatgtgcgccgtgattgacgggaacagcaccaccttcgagcaccagcagccgttgcaggaccggatgttcaagtttgaactcacccgccgtctggagcacgactttggcaaggtgacaaagcaggaagtcagagagttcttccgctgggcgcaggatcacgtgaccgaggtggcgcacgagttctacgtcagaaagggtggagccaacaagagacccgcccccgatgacgcggataaaagcgagcccaagcgggcctgcccctcagtcgcggatccatcgacgtcagacgcggaaggagctccggtggactttgccgacaggtaccaaaacaaatgttctcgtcacgcgggcatgcttcagatgctgtttccctgcaaaacatgcgagagaatgaatcagaatttcaacatttgcttcacgcacgggaccagagactgttcagaatgtttccccggcgtgtcagaatctcaaccggtcgtcagaaaaaagacgtatcggaaactctgtgcgattcatcatctgctgggggcgggcacccgagattgcttgctcggcctgcgatctggtcaacgtggacctagatgactgtgtttctgagcaataaatgacttaaaccaggtatggctgccgatggttatcttccagattggctcgaggacaacctctctgagggcattcgcgagtggtgggacttgaaacctggagccccgaaacccaaagccaaccagcaaaagcaggacgacggccggggtctggtgcttcctggctacaagtacctcggacccttcaacggactcgacaagggggagcccgtcaacgcggcggacgcagcggccctcgagcacgacaaggcctacgaccagcagctcaaagcgggtgacaatccgtacctgcggtataaccacgccgacgccgagtttcaggagcgtctgcaagaagatacgtcttttgggggcaacctcgggcgagcagtcttccaggccaagaagcgggttctcgaacctctcggtctggttgaggaaggcgctaagacggctcctggaaagaagagaccggtagagccatcaccccagcgttctccagactcctctacgggcatcggcaagaaaggccagcagcccgcgaaaaagagactcaactttgggcagactggcgactcagagtcagtgcccgaccctcaaccaatcggagaaccccccgcaggcccctctggtctgggatctggtacaatggctgcaggcggtggcgctccaatggcagacaataacgaaggcgccgacggagtgggtagttcctcaggaaattggcattgcgattccacatggctgggcgacagagtcatcaccaccagcacccgaacctgggccctccccacctacaacaaccacctctacaagcaaatctccaacgggacttcgggaggaagcaccaacgacaacacctacttcggctacagcaccccctgggggtattttgactttaacagattccactgccacttctcaccacgtgactggcagcgactcatcaacaacaactggggattccggcccaagagactcaacttcaagctcttcaacatccaggtcaaggaggtcacgcagaatgaaggcaccaagaccatcgccaataaccttaccagcacgattcaggtctttacggactcggaataccagctcccgtacgtcctcggctctgcgcaccagggctgcctgcctccgttcccggcggacgtcttcatgattcctcagtacgggtacctgactctgaacaatggcagtcaggccgtgggccgttcctccttctactgcctggagtactttccttctcaaatgctgagaacgggcaacaactttgagttcagctaccagtttgaggacgtgccttttcacagcagctacgcgcacagccaaagcctggaccggctgatgaaccccctcatcgaccagtacctgtactacctgtctcggactcagtccacgggaggtaccgcaggaactcagcagttgctattttctcaggccgggcctaataacatgtcggctcaggccaaaaactggctacccgggccctgctaccggcagcaacgcgtctccacgacactgtcgcaaaataacaacagcaactttgcctggaccggtgccaccaagtatcatctgaatggcagagactctctggtaaatcccggtgtcgctatggcaacccacaaggacgacgaagagcgattttttccgtccagcggagtcttaatgtttgggaaacagggagctggaaaagacaacgtggactatagcagcgttatgctaaccagtgaggaagaaattaaaaccaccaacccagtggccacagaacagtacggcgtggtggccgataacctgcaacagcaaaacgccgctcctattgtaggggccgtcaacagtcaaggagccttacctggcatggtctggcagaaccgggacgtgtacctgcagggtcctatctgggccaagattcctcacacggacggaaactttcatccctcgccgctgatgggaggctttggactgaaacacccgcctcctcagatcctgattaagaatacacctgttcccgcggatcctccaactaccttcagtcaagctaagctggcgtcgttcatcacgcagtacagcaccggacaggtcagcgtggaaattgaatgggagctgcagaaagaaaacagcaaacgctggaacccagagattcaatacacttccaactactacaaatctacaaatgtggactttgctgttaacacagatggcacttattctgagcctcgccccatcggcacccgttacctcacccgtaatctgtaattgcttgttaatcaataaaccggttgattcgtttcagttgaactttggtctctgcgaagggcgaattc

SEQ ID NO: 400 - protein, 738 aa, Artificial Sequence; identical to SEQ ID NO: 16
  source: /note="Description of Artificial Sequence: Synthetic polypeptide"

SEQ ID NO: 401 - protein, 733 aa, Artificial Sequence
  source: /note="Description of Artificial Sequence: Synthetic polypeptide"
MAADGYLPDWLEDNLSEGIREWWDLRPGAPKPKANQQKQDDGRGLVLPGYKYLGPFNGLDKGEPVNEADAAALEHDKAYDKQLEQGDNPYLKYNHADAEFQERLQEDTSFGGNLGRAVFQAKKRVLEPLGLVEEGAKTAPGKKRPIESPDSSTGIGKKGQQPAKKRLNFGQTGDSESVPDPQPIGEPPAGPSGLGSGTMAAGGGAPMADNNEGADGVGSSSGNWHCDSTWLGDRVITTSTRTWALPTYNNHLYKQISNGTSGGSTNDNTYFGYSTPWGYFDFNRFHCHFSPRDWQRLINNNWGFRPKRLNFKLFNIQVKEVTQNEGTKTIANNLTSTIQVFTDSEYQLPYVLGSAHQGCLPPFPADVFMIPQYGYLTLNNGSQAVGRSSFYCLEYFPSQMLRTGNNFEFSYQFEDVPFHSSYAHSQSLDRLMNPLIDQYLYYLSRTQSTGGTAGTQQLLFSQAGPNNMSAQAKNWLPGPCYRQQRVSTTVSQNNNSNFAWTGATKYHLNGRDSLVNPGVAMATHKGDEERFFPSSGVLMFGKQGAGKDNVDYSSVMLTSEEEIKTTNPVATEQYGVVADNLQQQNAAPIVGAVNSQGALPGMVWQNRDVYLQGPIWAKIPHTDGNFHPSPLMGGFGLKHPPPQILIKNTPVPADPPTTFSQAKLASFITQYSTGQVSVEIEWELQKENSKRWNPEIQYTSNYYKSTNVDFAVNTEGTYSEPRPIGTRYLTRNL

SEQ ID NO: 402 - DNA, 2501 bp, Artificial Sequence
  source: /note="Description of Artificial Sequence: Synthetic polynucleotide"
gaattcgcccttggctgcgtcaactggaccaatgagaactttcccttcaacgattgcgtcgacaagatggtgatctggtgggaggagggcaagatgacggccaaggtcgtggagtccgccaaggccattcatcatctgctggggcgggctcccgagattgcttgctcggcctgcgatctggtcaacgtggacctggatgactgtgtttctgagcaataaatgacttaaaccaggtatggctgccgatggttatcttccagattggctcgaggacaacctctctgagggcattcgcgagtggtgggacttgagacctggagccccgaaacccaaagccaaccagcaaaagcaggacgacggccggggtctggtgcttcctggctacaagtacctcggacccttcaacggactcgacaagggagagccggtcaacgaggcagacgccgcggccctcgagcacgacaaggcctacgacaagcagctcgagcagggggacaacccgtacctcaagtacaaccacgccgacgccgagtttcaggagcgtcttcaagaagatacgtcttttgggggcaacctcgggcgagcagtcttccaggccaagaagcgggttctcgaacctctcggtctggttgaggaaggcgctaagacggctcctggaaagaagagacccatagaatcccccgactcctccacgggcatcggcaagaaaggccagcagcccgctaaaaagagactcaactttgggcagactggcgactcagagtcagtgcccgaccctcaaccaatcggagaaccccccgcaggcccctctggtctgggatctggcacaatggctgcaggcggtggcgctccaatggcagacaataacgaaggcgccgacggagtgggtagttcctcaggaaattggcattgcgattccacatggctgggcgacagagtcatcaccaccagcacccgaacctgggccctccccacctacaacaaccacctctacaagcaaatctccaacgggacatcgggaggaagcaccaacgacaacacctacttcggctacagcaccccctgggggtattttgactttaacagattccactgccacttctcaccacgtgactggcagcgactcatcaacaacaactggggattccggcccaagagactcaacttcaagctcttcaacatccaggtcaaggaggtcacgcagaatgaaggcaccaagaccatcgccaataaccttaccagcacgattcaggtctttacggactcggaataccagctcccgtacgtcctcggctctgcgcaccagggctgcctgcctccgttcccggcggacgtcttcatgattcctcagtacgggtacctgactctgaacaacggcagtcaggccgtgggccgttcctccttctactgcctggagtactttccttctcaaatgctgagaacgggcaacaactttgagttcagctaccagtttgaggacgtgccttttcacagcagctatgcgcacagccaaagcctggaccggctgatgaaccccctcatcgaccagtacctgtactacctgtctcggactcagtccacgggaggtaccgcaggaactcagcagttgctattttctcaggccgggcctaataacatgtcggctcaggccaaaaactggctacccgggccctgctaccggcagcaacgcgtctccacgacagtgtcgcaaaataacaacagcaactttgcttggaccggtgccaccaagtatcatctgaatggcagagactctctggtaaatcccggtgtcgctatggcaacgcacaagggcgacgaagagcgattttttccatccagcggagtcttgatgtttgggaaacagggagctggaaaagacaacgtagactatagcagcgttatgctaaccagtgaggaagaaatcaaaaccaccaacccagtggccacagaacagtacggcgtggtggccgataacctgcaacagcaaaacgccgctcctattgtaggggccgtcaacagtcaaggagccttacctggcatggtctggcagaaccgggacgtgtacctgcagggtcctatctgggccaagattcctcacacggacggcaactttcatccttcgccgctgatgggaggctttggactgaaacacccgcctcctcagatcctgattaagaatacacctgttcccgcggatcctccaactaccttcagtcaagccaagctggcgtcgttcatcacgcagtacagcaccggacaggtcagcgtggaaattgaatgggagctgcagaaagagaacagcaagcgctggaacccagagattcagtatacttccaactactacaaatctacaaatgtggactttgctgtcaatactgagggtacttattcagagcctcgccccattggcacccgttacctcacccgtaacctgtaattgcctgttaatcaataaaccggttgattcgtttcagttgaactttggtctcaagggcgaattc

SEQ ID NO: 403 - DNA, 2187 bp, Artificial Sequence
  source: /note="Description of Artificial Sequence: Synthetic polynucleotide"
atggctgccgatggttatcttccagattggctcgaggacaacctctctgagggcattcgcgagtggtgggacttgaaacctggagccccgaaacccaaagccaaccagcaaaagcaggacgacggccggggtctggtgcttcctggctacaagtacctcggacccttcaacggactcgacaagggagagccggtcaacgaggcagacgccgcggccctcgagcacgacaaggcctacgacaagcagctcgagcagggggacaacccgtacctcaagtacaaccacgccgacgccgagtttcaggagcgtcttcaagaagatacgtcttttgggggcaacctcgggcgagcagtcttccaggccaagaagcgggttctcgaacctctcggtctggttgaggaaggcgctaagacggctcctggaaagaagagacccatagaatcccccgactcctccacgggcatcggcaagaaaggccagcagcccgctaaaaagaagctcaactttgggcagactggcgactcagagtcagtgcccgacccccaacctctcggagaacctcccgccgcgccctcaggtctgggatctggtacaatggctgcaggcggtggcgcaccaatggcagacaataacgaaggcgccgacggagtgggtaatgcctccggaaattggcattgcgattccacatggctgggcgacagagtcatcaccaccagcacccgcacctgggccctgcccacctacaacaaccacctctacaagcagatatcaagtcagagcggggctaccaacgacaaccacttcttcggctacagcaccccctggggctattttgacttcaacagattccactgccacttctcaccacgtgactggcagcgactcatcaacaacaactggggattccggcccagaaagctgcggttcaagttgttcaacatccaggtcaaggaggtcacgacgaacgacggcgttacgaccatcgctaataaccttaccagcacgattcaggtcttctcggactcggagtaccaactgccgtacgtcctcggctctgcgcaccagggctgcctccctccgttccctgcggacgtgttcatgattcctcagtacggatatctgactctaaacaacggcagtcagtctgtgggacgttcctccttctactgcctggagtactttccttctcagatgctgagaacgggcaataactttgaattcagctacacctttgaggaagtgcctttccacagcagctatgcgcacagccagagcctggaccggctgatgaatcccctcatcgaccagtacctgtactacctggcccggacccagagcactacggggtccacaagggagctgcagttccatcaggctgggcccaacaccatggccgagcaatcaaagaactggctgcccggaccctgttatcggcagcagagactgtcaaaaaacatagacagcaacaacaacagtaactttgcctggaccggggccactaaataccatctgaatggtagaaattcattaaccaacccgggcgtagccatggccaccaacaaggacgacgaggaccagttctttcccatcaacggagtgctggtttttggcgaaacgggggctgccaacaagacaacgctggaaaacgtgctaatgaccagcgaggaggagatcaaaaccaccaatcccgtggctacagaagaatacggtgtggtctccagcaacctgcaatcgtctacggccggaccccagacacagactgtcaacagccagggggctctgcccggcatggtctggcagaaccgggacgtgtacctgcagggtcccatctgggccaaaattcctcacacggacggcaactttcacccgtctcccctgatgggcggatttggactcaaacacccgcctcctcaaattctcatcaaaaacaccccggtacctgctaatcctccagaggtgtttactcctgccaagtttgcctcatttatcacgcagtacagcaccggccaggtcagcgtggagatcgagtgggaactgcagaaagaaaacagcaaacgctggaatccagagattcagtacacctcaaattatgccaagtctaataatgtggaatttgctgtcaacaacgaaggggtttatactgagcctcgccccattggcacccgttacctcacccgtaacctgtaa

SEQ ID NO: 404 - protein, 728 aa, Artificial Sequence; identical to SEQ ID NO: 72
  source: /note="Description of Artificial Sequence: Synthetic polypeptide"

SEQ ID NO: 405 - protein, 728 aa, Artificial Sequence; identical to SEQ ID NO: 164
  source: /note="Description of Artificial Sequence: Synthetic polypeptide"

SEQ ID NO: 406 - protein, 728 aa, Artificial Sequence; identical to SEQ ID NO: 164
  source: /note="Description of Artificial Sequence: Synthetic polypeptide"

SEQ ID NO: 407 - protein, 733 aa, Artificial Sequence
  source: /note="Description of Artificial Sequence: Synthetic polypeptide"
MAADGHLPDWLEDNLSEGIREWWDLKPGAPKPKANQQKQDDGRGLVLPGYKYLGPFNGLDKGEPVNAADAAALEHDKAYDQQLKAGDNPYLRYNHADAEFQERLQEDTSFGGNLGRAVFQAKKRVLEPLGLVEEGAKTAPGKKRPIESPDSSTGIGKKGQQPAKKKLNFGQTGDSESVPDPQPIGEPPAGPSGLGSGTMAAGGGAPMADNNEGADGVGSSSGNWHCDSTWLGDRVITTSTRTWALPTYNNHLYKQISNGTSGGSTNDNTYFGYSTPWGYFDFNRFHCHFSPRDWQRLINNSWGFRPKRLNFKLFNIQVKEVTQNEGTKTIANNLTSTIQVFTDSEYQLPYVLGSAHQGCLPPFPADVFMIPQYGYLTLNNGSQAVGRSSFYCLEYFPSQMLRTGNNFEFSYQFEDVPFHSSYAHSQSLDRLMNPLIDQYLYYLSRTQSTGGTAGTQQLLFSQAGPNNMSAQAKNWLPGPCYRQQRVSTTLSQNNNSNFAWTGATKYHLNGRDSLVNPGVAMATHKDDEERFFPSSGVLMFGKQGAGKDNVDYSSVMLTSEEEIKTTNPVATEQYGVVADNLQQQNAAPIVGAVNSQGALPGMVWQNRDVYLQGPIWAKIPHTDGNFHPSPLMGGFGLKHPPPQILIKNTPVPADPPTTFSQAKLASFITQYSTGQVSVEIEWELQKENSKRWNPEIQYTSNYYKSTNVDFAVNTEGTYSEPRPIGTRYLTRNL

SEQ ID NO: 408 - DNA, 3113 bp, Artificial Sequence
  source: /note="Description of Artificial Sequence: Synthetic polynucleotide"
gaattcgccctttctacggctgcgtcaactggaccaatgagaactttcccttcaacgattgcgtcgacaagatggtgatctggtgggaggagggcaagatgacggccaaggtcgtggagtccgccaaggccattctcggcggcagcaaggtgcgcgtggaccaaaagtgcaagtcgtccgcccagatcgatcccacccccgtgatcgtcacttccaacaccaacatgtgcgccgtgattgacgggaacagcaccaccttcgagcaccagcagccgttacaagaccggatgttcaaatttgaactcacccgccgtctggagcatgactttggcaaggtgacaaagcaggaagtcaaagagttcttccgctgggcgcaggatcacgtgaccgaggtggcgcatgagttctacgtcagaaagggtggagccaacaagagacccgcccccgatgacgcggataaaagcgagcccaagcgggcctgcccctcagtcgcggatccatcgacgtcagacgcggaaggagctccggtggactttgccgacaggtaccaaaacaaatgttctcgtcacgcgggcatgcttcagatgctgcttccctgcaagacatgcgagagaatgaatcagaatttcagcatttgcttcacgcacgggaccagagactgttcagaatgtttccccggcgtgtcagaatctcaaccggtcgtcagaaagaggacgtatcggaaactctgtgccattcatcatctgctggggcgggctcccgagattgcttgctcggcctgcgatctggtcaacgtggacctggatgactgtgtttctgagcaataaatgacttaaaccaggtatggctgccgatggtcatcttccagattggctcgaggacaacctctctgagggcattcgcgagtggtgggacttgaaacctggagccccgaaacccaaagccaaccagcaaaagcaggacgacggccggggtctggtgcttcctggctacaagtacctcggacccttcaacggactcgacaagggggagcccgtcaacgcggcggacgcagcggccctcgagcacgacaaggcctacgaccagcagctcaaagcgggtgacaatccgtacctgcggtataaccacgccgacgccgagtttcaggagcgtcttcaagaagatacgtcttttgggggcaacctcgggcgagcagtcttccaggccaagaagcgggttctcgaacctctcggtctggttgaggaaggcgctaagacggctcctggaaagaagagacccatagaatcccccgactcctccacgggcatcggcaagaaaggccagcagcccgctaaaaagaagctcaactttgggcagactggcgactcagagtcagtgcccgaccctcaaccaatcggagaaccccccgcaggcccctctggtctgggatctggtacaatggctgcaggcggtggcgctccaatggcagacaataacgaaggcgccgacggagtgggtagttcctcaggaaattggcattgcgattccacatagctgggcgacagagtcatcaccaccagcacccgaacctgggccctccccacctacaacaaccacctctacaagcaaatctccaacgggacatcgggaggaagcaccaacgacaacacctacttcggctacagcaccccctgggggtattttgactttaacagattccactgccacttctcaccacgtgactggcagcgactcatcaacaacagctggggattccggcccaagagactcaacttcaagctcttcaacatccaggtcaaggaggtcacgcagaatgaaggcaccaagaccatcgccaataaccttaccagcacgattcaggtctttacggactcggaataccagctcccgtacgtcctcggctctgcgcaccagggctgcctgcctccgttcccggcggacgtcttcatgattcctcagtacgggtacctgactctgaacaacggcagtcaggccgtgggccgttcctccttctactgcctggagtactttccttctcaaatgctgagaacgggcaacaactttgagttcagctaccagtttgaggacgtgccttttcacagcagctacgcgcacagccaaagcctggaccggctgatgaaccccctcatcgaccagtacctgtactacctgtctcggactcagtccacgggaggtaccgcaggaactcagcagttgctattttctcaggccgggcctaataacatgtcggctcaggccaaaaactggctacccgggccctgctaccggcagcaacgcgtctccacgacactgtcgcaaaataacaacagcaactttgcttggaccggtgccaccaagtatcatctgaatggcagagactctctggtaaatcccggtgtcgctatggcaacgcacaaggacgacgaagagcgattttttccatccagcggagtcttgatgtttgggaaacagggagctggaaaagacaacgtggactatagcagcgttatgctaaccagtgaggaagaaatcaaaaccaccaacccagtggccacagaacagtacggcgtggtggccgataacctgcaacagcaaaacgccgctcctattgtaggggccgtcaacagtcaaggagccttacctggcatggtctggcagaaccgggacgtgtacctgcagggtcctatctgggccaagattcctcacacggacggcaactttcatccttcgccgctgatgggaggctttggactgaaacacccgcctcctcagatcctgattaagaatacacctgttcccgcggatcctccaactaccttcagtcaagccaagctggcgtcgttcatcacgcagtacagcaccggacaggtcagcgtggaaattgaatgggagctgcagaaagagaacagcaagcgctggaacccagagattcagtatacttccaactactacaaatctacaaatgtggactttgctgtcaatactgagggtacttattcagagcctcgccccattggcacccgttacctcacccgtaacctgtaattgcctgttaatcaataaaccggttaattcgtttcagttgaactttggtctctgcgaagggcgaattc

SEQ ID NO: 409 - protein, 731 aa, Artificial Sequence
  source: /note="Description of Artificial Sequence: Synthetic polypeptide"
MAADGYLPDWLEDNLSEGIREWWDLKPGAPKPKANQQKQDDGRGLVLPGYKYLGPFNGLDKGEPVNEADAAALEHDKAYDKQLEQGDNPYLKYNHADAEFQERLQEDTSFGGNLGRAVFRAKKRVLEPLGLVEEGAKTAPGKKRPIESPDSSTGIGKKGQQPAKKKLNFGQTGDSESVPDPQPLGEPPAAPSGLGSGTMAAGGGAPMADNNEGADGVGNASGNWHCDSTWLGDRVITTSTRTWALPTYNNHLYKQISSQSGATNDNHFFGYSTPWGYFDFNRFHCHFSPRDWQRLINNNRGFRPRKLRFKLFNIQVKEVTTNDGVTTIANNLTSTIQVFSDSEYQLPYVLGSAHQGCLPPFPADVFMIPQYGYLTLNNGSQSVGRSSFYCLEYFPSQMLRTGNNFEFSYQFEDVPFHSSYAHSQSLDRLMNPLIDQYLYYLSRTQSTGGTAGTQQLLFSQAGPNNMSAQAKNWLPGPCYRQQRVSTTLSQNNNSNFAWTGATKYHLNGRDSLVNPGVAMATHKDDEERFFPSSGVLMFGKQGAGKDNVDYSSVMLTSEEEIKTTNPVATEQYGVVADNLQQQNAAPIVGAVNSQGALPGMAWQNRDVYLQGPIWAKIPHTDGNFHPSPLMGGFGLKHPPPQILIKNTPVPADPPTTFSQAKLASFITQYSTGQVSVEIEWELQKENSKRWNPEIQYTSNYYKSTNVDFAVNTEGTYSEPRPIGTRYLTRNL

SEQ ID NO: 410 - DNA, 3106 bp, Artificial Sequence
  source: /note="Description of Artificial Sequence: Synthetic polynucleotide"
gaattcgcccttctacggctgcgtcaactggaccaatgagaactttcccttcaacgattgcgtcgacaagatggtgatctggtgggaggagggcaagatgacggccaaggtcgtggagtccgccaaggccattctcggcggcagcaaggtgcgcgtggaccaaaagtgcaagtcgtccgcccagatcgaccccacccccgtgatcgtcacctccaacaccaacatgtgcgccgtgattgacgggaacagcaccaccttcgagcaccagcagccgttgcaggaccggatgttcaaatttgaactcacccgccgtctggagcatgactttggcaaggcgacaaagcaggaagtcaaagagttcttccgctgggcgcaggatcacgtgaccgaggtggcgcatgagttctacgtcagaaagggtggagccaacaagagacccgcccccgatgacgcggataaaagcgagcccaagcgggcccgcccctcagtcgcggatccatcgacgtcagacgcggaaggagctccggtggactttgccgacaggtaccaaaacaaatgttctcgtcacgcgggcatgcttcagatgctgtttccctgcaaaacatgcgagagaatgaatcagaatttcaacatttgcttcacgcacgggaccagagactgttcagaatgtttccccggcgtgtcagaatctcaaccggtcgtcagaaagaggacgtatcggaaactctgtgccattcatcatctgctggggcgggctcccgagattgcttgctcggcctgcgatctggtcaacgtggacctggatgactgtgtttctgagcaataaatgacttaaaccaggtatggctgccgatggttatcttccagattggctcgaggacaacctctctgagggcattcgcgagtggtgggacttgaaacctggagccccgaaacccaaagccaaccagcaaaagcaggacgacggccggggtctggtgcttcctggctacaagtacctcggacccttcaacggactcgacaagggagagccggtcaacgaggcagacgccgcggccctcgagcacgacaaggcctacgacaagcagctcgagcagggggacaacccgtacctcaagtacaaccacgccgacgccgagtttcaggagcgtcttcaagaagatacgtcttttgggggcaacctcgggcgagcagtcttccgggccaagaagcgggttctcgaacctctcggtctggttgaggaaggcgctaagacggctcctggaaagaagagacccatagaatcccccgactcctccacgggcatcggcaagaaaggccagcagcccgctaaaaagaagctcaactttgggcagactggcgactcagagtcagtgcccgacccccaacctctcggagaacctcccgccgcgccctcaggtctgggatctggtacaatggctgcaggcggtggcgcaccaatggcagacaataacgaaggcgccgacggagtgggtaatgcctccggaaattggcattgcgattccacatggctgggcgacagagtcatcaccaccagcacccgcacctgggccctgcccacctacaacaaccacctctacaagcagatatcaagtcagagcggggctaccaacgacaaccacttcttcggctacagcaccccctggggctattttgacttcaacagattccactgccacttctcaccacgtgactggcagcgactcatcaacaacaaccggggattccggcccagaaagctgcggttcaagttgttcaacatccaggtcaaggaggtcacgacgaacgacggcgttacgaccatcgctaataaccttaccagcacgattcaggtcttctcggactcggagtaccaactgccgtacgtcctcggctctgcgcaccagggctgcctccctccgttccctgcggacgtgttcatgattcctcagtacggatatctgactctaaacaacggcagtcagtctgtgggacgttcctccttctactgcctggagtactttccttctcagatgctgagaacgggcaataactttgaattcagctaccagtttgaggacgtgccctttcacagcagctacgcgcacagccaaagcctggaccggctgatgaaccccctcatcgaccagtacctgtactacctgtctcggactcagtccacgggaggtaccgcaggaactcagcagttgctattttctcaggccgggcctaataacatgtcggctcaggccaaaaactggctacccgggccctgctaccggcagcaacgcgtctccacgacactgtcgcaaaataacaacagcaactttgcttggaccggtgccaccaagtatcatctgaatggcagagactctctggtaaatcccggtgtcgctatggcaacgcacaaggacgacgaagagcgattttttccatccagcggagtcttgatgtttgggaaacagggagctggaaaagacaacgtggactatagcagcgttatgctaaccagtgaggaagaaatcaaaaccaccaacccagtggccacagaacagtacggcgtggtggccgataacctgcaacagcaaaacgccgctcctattgtaggggccgtcaacagtcaaggagccttacctggcatggcctggcagaaccgggacgtgtacctgcagggtcctatctgggccaagattcctcacacggacggcaactttcatccttcgccgctgatgggaggctttggactgaaacacccgcctcctcagatcctgattaagaatacacctgttcccgcggatcctccaactaccttcagtcaagccaagctggcgtcgttcatcacgcagtacagcaccggacaggtcagcgtggaaattgaatgggagctgcagaaagagaacagcaagcgctggaacccagagattcagtatacttccaactactacaaatctacaaatgtggactttgctgtcaatactgagggtacttattcagagcctcgccccattggcacccgttacctcacccgtaacctgtaattgcctgttaatcaataaaccggttaattcgtttcagttgaactttggtctctgcgaagggcgaattc

SEQ ID NO: 411 - protein, 738 aa, Artificial Sequence
  source: /note="Description of Artificial Sequence: Synthetic polypeptide"
MAADGYLPDWLEDNLSEGIREWWDLKPGAPKPKANQQKQDDGRGLVLPGYKYLGPFNGLDKGEPVNEADAAALEHDKAYDKQLEQGDNPYLKYNHADAEFQERLQEDTSFGGNLGRAVFQAKKRVLEPLGLVEEGAKTAPGKKRPVEPSPQRSPDSSTGIGKTGQQPAKKRLNFGQTGDSESVPDPQPIGEPPAGPSGLGSGTMAAGGGAPMADNNEGADGVGSSSGNWHCDSTWLGDRVITTSTRTWALPTYNNHLYKQISNGTSGGSTNDNTYFGYSTPWGYFDFNRFHCHFSPRDWQRLINNNWGFRPKRLNFKLFNIQVKEVTQNEGTKTIANNLTSTIQVFTDSEYQLPYVLGSAHQGCLPPFPADVFMIPQYGYLTLNNGSQAVGRSSFYCLEYFPSQMLRTGNNFEFSYQFEDVPFHSSYAHSQSLDRLMNPLIDQYLYYLSRTQSTGGTAGTQQLLFSQAGPNNMSAQAKNWLPGPCYRQQRVSTTLSQNNNSNFAWTGATKYHLNGRDSLVNPGVAMATHKDDEERFFPSSGVLMFGKQGAGKDNVDYSSVMLTSEEEIKTTNPVATEQYGVVADNLQQQNAAPIVGAVNSQGALPGMVWQNRDVYLQGPIWAKIPHTDGNFHPSPLMGGFGLKHPPPQILIKNTPVPADPPTTFSQAKLASFITQYSTGQVSVEIEWELQKENSKRWNPEIQYTSNYYKSTNVDFAVNTEGTYSEPRPIGTRYLTRNL

SEQ ID NO: 412 - DNA, 3197 bp, Artificial Sequence
  source: /note="Description of Artificial Sequence: Synthetic polynucleotide"
gaattcgccctttctacggctgcgtcaactggaccaatgagaactttcccttcaacgattgcgtcgacaagatggtgatctggtgggaggagggcaagatgacggccaaggtcgtggagtccgccaaggccattctcggcggcagcaaggtgcgcgtggaccaaaagtgcaagtcgtccgcccagatcgaccccacccccgtgatcgtcacctccaacaccaacatgtgcgccgtgattgacgggaacagcaccaccttcgagcaccagcagccgttacaagaccggatgttcaaatttgaactcacccgccgtctggagcacgactttggcaaggtgacaaagcaggaagtcaaagagttcttccgctgggcgcaggatcacgtgaccgaggtggcgcatgagttctacgtcagaaagggtggagccaacaagagacccgcccccgatgacgcggataaaagcgagcccaagcgggcctgcccctcagtcgcggatccatcgacgtcagacgcggaaggagctccggtggactttgccgacaggtaccaaaacaaatgttctcgtcacgcgggcatgcttcagatgctgtttccctgcaagacatgcgagagaatgaatcagaatttcaacatttgcttcacgcacgggaccagagactgttcagaatgtttccccggcgtgtcagaatctcaaccggtcgtcagaaagaggacgtatcggaaactctgtgccattcatcatctgctggggcgggctcccgagattgcttgctcggcctgcgatctggtcaacgtggacctggatgactgtgtttctgagcaataaatgacttaaaccaggtatggctgccgatggttatcttccagattggctcgaggacaacctctctgagggcattcgcgagtggtgggacttgaaacctggagccccgaaacccaaagccaaccagcaaaagcaggacgacggccggggtctggtgcttcctggctacaagtacctcggacccttcaacggactcgacaagggagagccggtcaacgaggcagacgccgcggccctcgagcacgacaaggcctacgacaagcagctcgagcagggggacaacccgtacctcaagtacaaccacgccgacgccgagtttcaggagcgtcttcaagaagatacgtcttttgggggcaacctcgggcgagcagtcttccaggccaagaagcgggttctcgaacctctcggtctggttgaggaaggcgctaagacggctcctggaaagaagagaccggtagagccatcaccccagcgttctccagactcctctacgggcatcggcaagacaggccagcagcccgcgaaaaagagactcaactttgggcagactggcgactcagagtcagtgcccgaccctcaaccaatcggagaaccccccgcaggcccctctggtctgggatctggtacaatggctgcaggcggtggcgctccaatggcagacaataacgaaggcgccgacggagtgggtagttcctcaggaaattggcattgcgattccacatggctgggcgacagagtcatcaccaccagcacccgaacctgggccctccccacctacaacaaccacctctacaagcaaatctccaacgggacatcgggaggaagcaccaacgacaacacctacttcggctacagcaccccctgggggtattttgactttaacagattccactgccacttctcaccacgtgactggcagcgactcatcaacaacaactggggattccggcccaagagactcaacttcaagctcttcaacatccaggtcaaggaggtcacgcagaatgaaggcaccaagaccatcgccaataaccttaccagcacgattcaggtctttacggactcggaataccagctcccgtacgtcctcggctctgcgcaccagggctgcctgcctccgttcccggcggacgtcttcatgattcctcagtacgggtacctgactctgaacaacggcagtcaggccgtgggccgttcctccttctactgcctggagtactttccttctcaaatgctgagaacgggcaacaactttgagttcagctaccagtttgaggacgtgccttttcacagcagctacgcgcacagccaaagcctggaccggctgatgaaccccctcatcgaccagtacctgtactacctgtctcggactcagtccacgggaggtaccgcaggaactcagcagttgctattttctcaggccgggcctaataacatgtcggctcaggccaaaaactggctacccgggccctgctaccggcagcaacgcgtctccacgacactgtcgcaaaataacaacagcaactttgcttggaccggtgccaccaagtatcatctgaatggcagagactctctggtaaatcccggtgtcgctatggcaacgcacaaggacgacgaagagcgattttttccatccagcggagtcttgatgtttgggaaacagggagctggaaaagacaacgtggactatagcagcgttatgctaaccagtgaggaagaaatcaaaaccaccaacccagtggccacagaacagtacggcgtggtggccgataacctgcaacagcaaaacgccgctcctattgtaggggccgtcaacagtcaaggagccttacctggcatggtctggcagaaccgggacgtgtacctgcagggtcctatctgggccaagattcctcacacggacggcaactttcatccttcgccgctgatgggaggctttggactgaaacacccgcctcctcagatcctgattaagaatacacctgttcccgcggatcctccaactaccttcagtcaagccaagctggcgtcgttcatcacgcagtacagcaccggacaggtcagcgtggaaattgaatgggagctgcagaaagagaacagcaagcgctggaacccagagattcagtatacttccaactactacaaatctacaaatgtggactttgctgtcaatactgagggtacttattcagagcctcgccccattggcacccgttacctcacccgtaacctgtaattgcctgttaatcaataaaccggttaattcgtttcagttgaactttggtctctgcgaagggcgaattcgtttaaacctgcaggactagtccctttagtgagggttaattctgagcttggcgtaatcatgggtcatag

SEQ ID NO: 413 - protein, 735 aa, Artificial Sequence
  source: /note="Description of Artificial Sequence: Synthetic polypeptide"
MAADGYLPDWLEDNLSEGIREWWDLKPGAPKPKANQQKQDDGRGLVLPGYKYLGPFNGLDKGEPVNEADAAALEHDKAYDKQLEQGDNPYLKYNHADAEFQERLQEDTSFGGNLGRAVFQAKKRVLEPLGLVEEGAKTAPGKKRPVEPSPQRSPDSSTGIGKTGQQPAKKRLNFGQTGDSESVPDPQPIGEPPAGPSGLGSGTMAAGGGAPMADNNEGADGVGSSSGNWHCDSTWLGDRVITTSTRTWALPTYNNHLYKQISNGTSGGSTNDNTYFGYSTPWGYFDFNRFHCHFSPRDWQRLINNNWGFRPRKLRFKLFNIQVKEVTTDDGVTTIANNLTSTIQVFSDSEYQLPYVLGSAHQGCLPPFPADVFMIPQYGYLTLNNGSQSVGRSSFYCLEYFPSQMLRTGNNFEFSYTFEEVPFHSSYAHSQSLDRLMNPLIDQYLYYLARTQSTTGSTRELQFHQAGPNTMAEQSKNWLPGPCYRQQRLSKNIDSNNNSNFAWTGATKYHLNGRNSLTNPGVAMATNKDDEDQFFPINGVLVFGKTGAANKTTLENVLMTSEEEIKTTNPVATEEYGVVSSNLQSSTAGPQTQTVNSQGALPGMVWQNRDVYLQGPIWAKIPHTDGNFHPSPLMDGFGLKHPPPQILIKNTPVPANPPEVFTPAKFASFITQYSTGQVSVEIEWELQKENSKRWNPEIQYTSNYAKSNNVEFAVNNEGVYTEPRPIGTRYLTRNL

SEQ ID NO: 414 - DNA, 3276 bp, Artificial Sequence
  source: /note="Description of Artificial Sequence: Synthetic polynucleotide"
gaattcgcccttcgcagagaccaaagttcaactgaaacgaattaaccggtttattgattaacaggcaattacaggttacgggtgaggtaacgggtgccaatggggcgaggctcagtataaaccccttcgttgttgacagcaaattccacattattagacttggcataatttgaggtgtactgaatctctggattccagcgtttgctgttttctttctgcagttcccactcgatctccacgctgacctggccggtgctgtactgcgtgataaatgaggcaaacttggcaggagtaaacacctctggaggattagcaggtaccggggtgtttttgatgagaatttgaggaggcgggtgtttgagtccaaatccgtccatcaggggagacgggtgaaagttgccgtccgtgtgaggaattttggcccagatgggaccctgcaggtacacgtcccggttctgccagaccatgccgggcagagccccctggctgttgacagtctgtgtctggggtccggccgtagacgattgcaggttgctggagaccacaccgtattcttctgtagccacgggattggtggttttgatctcctcctcgctggtcattagcacgttttccagcgttgtcttgttggcagcccccgttttgccaaaaaccagcactccgttgatgggaaagaactggtcctcgtcgtccttgttggtggccatggctacgcccgggttggttaatgaatttctaccattcagatggtatttagtggccccggtccaggcaaagttactgttgttgttgctgtctatgttttttgacagtctctgctgccgataacagggtccgggcagccagttctttgattgctcggccatggtgttgggcccagcctgatggaactgcagctcccttgtggaccccgtagtgctctgggtccgggccaggtagtacaggtactggtcgatgaggggattcatcagccggtccaggctctggctatgcgcatagctgctgtggaaaggcacttcctcaaaggtgtagctgaattcaaagttattgcccgttctcagcatctgagaaggaaagtactccaggcagtagaaggaggaacgtcccacagactgactgccgttgtttagagtcagatatccgtactgaggaatcatgaacacgtccgcagggaacggagggaggcagccctggtgcgcagagccgaggacgtacggcagttggtactccgagtccgagaagacctgaatcgtgctggtaaggttattagcgatggtcgtaacgccgtcgtccgtcgtgacctccttgacctggatgttgaacaacttgaaccgcagctttctgggccggaatccccagttgttgttgatgagtcgctgccagtcacgtggtgagaagtggcagtggaatctgttaaagtcaaaatacccccagggggtgctgtagccgaagtaggtgttgtcgttggtgcttcctcccgatgtcccgttggagatttgcttgtagaggtggttgttgtaggtggggagggcccaggttcgggtgctggtggtgatgactctgtcgcccagccatgtggaatcgcaatgccaatttcctgaggaactacccactccgtcggcgccttcgttattgtctgccattggagcgccaccgcctgcagccattgtaccagatcccagaccagaggggcctgcggggggttctccgattggttgagggtcgggcactgactctgagtcgccagtctgcccaaagttgagtctctttttcgcgggctgctggcctgtcttgccgatgcccgtagaggagtctggagaacgctggggtgatggctctaccggtctcttctttccaggagccgtcttagcgccttcctcaaccagaccgagaggttcgagaacccgcttcttggcctggaagactgctcgcccgaggttgcccccaaaagacgtatcttcttgaagacgctcctgaaactcggcgtcggcgtggttgtacttgaggtacgggttgtccccctgctcgagctgcttgtcgtaggccttgtcgtgctcgagggccgcggcgtctgcctcgttgaccggctctcccttgtcgagtccgttgaagggtccgaggtacttgtagccaggaagcaccagaccccggccgtcgtcctgcttttgctggttggctttgggtttcggggctccaggtttcaagtcccaccactcgcgaatgccctcagagaggttgtcctcgagccaatctggaagataaccatcggcagccatacctggtttaagtcatttattgctcagaaacacagtcatccaggtccacgttgaccagatcgcaggccgagcaagcaatctcgggagcccgccccagcagatgatgaatggcacagagtttccgatacgtcctctttctgacgaccggttgagattctgacacgccggggaaacattctgaacagtctctggtcccgtgcgtgaagcaaatgttgaaattctgattcattctctcgcatgtcttgcagggaaacagcatctgaagcatgcccgcgtgacgagaacacttgttttggtacctgtcggcaaagtccaccggagctccttccgcgtctgacgtcgatggatgcaaaatgtcgcaaaagcactcacgtgacagctaatacaggaccactcccctatgacgtgatttacgtcagcgctatgcccgcgtgacgagaacatttgttttggtacctgtcggcaaagtccaccggagctccttccgcgtctgacgtcgatggatccgcgactgaggggcaggcccgcttgggctcgcttttatccgcgtcatcgggggcgggtctcttgttggctccaccctttctgacgtagaactcatgcgccacctcggtcacgtgatcctgcgcccagcggaagaactctttgacttcctgctttgtcaccttgccaaagtcatgctccagacggcgggtgagttcaaatttgaacatccggtcctgcaacggctgctggtgctcgaaggtggtgctgttcccgtcaatcacggcgcacatgttggtgttggaagtgacgatcacgggggtgggatcgatctgggcggaagacttgcacttttggtccacgcgcaccttgctgccgccgagaatggccttggcggactccacgaccttggccgtcatcttgccctcctcccaccagatcaccatcttgtcgacgcaatcgttgaagggaaagttctcattggtccagttgacgcagccgtagaaagggcgaattc

SEQ ID NO: 415 - protein, 738 aa, Artificial Sequence; identical to SEQ ID NO: 80
  source: /note="Description of Artificial Sequence: Synthetic polypeptide"

SEQ ID NO: 416 - protein, 738 aa, Artificial Sequence
  source: /note="Description of Artificial Sequence: Synthetic polypeptide"
MAADGYLPDWLEDNLSEGIREWWDLKPGAPKPKANQQKQDDGRGLVLPGYKYLGPFNGLDKGEPVNAADAAALEHDKAYDQQLKAGDNPYLRYNHADAEFQERLQEDTSFGGNLGRAVFQAKKRVLEPLGLVEEGAKTAPGKKRPVEPSPQRSPDSSTGIGKKGHQPARKRLNFGQTGDSESVPDPQPIGEPPAGPSGLGSGTMAAGGGAPMADNNEGADGVGSSSGNWHCDSTWLGDRVITTSTRTWALPTYNNHLYKQISNGTSGGSTNDNTYFGYSTPWGYFDFNRFHCHFSPRDWQRLINNNWGFRPKRLNFKLFNIQVKEVTQNEGTKTIANNLTSTIQVFTDSEYQLPYVPGSAHQGCLPPFPADVFMIPQYGYLTLNNGSQAVGRSSFYCLEYFPSQMLRTGNNFEFSYTFEDVPFHSSYAHSQSLDRLMNPLIDQYLYYLSRTQSTGGTQGTQQLLFSQAGPANMSAQAKNWLPGPCYRQQRVSTTLSQNNNSNFAWTGATKYHLNGRDSLVNPGVAMATHKDDEERFFPSSGVLMFGKQGAGKDNVDYSSVMLTSEEEIKTTNPVATEQYGVVADNLQQTNGAPIVGTVNSQGALPGMVWQNRDVYLQGPIWAKIPHTDGNFHPSPLMGGFGLKHPPPQILIKNTPVPADPPTTFSQAKLASFITQYSTGQVSVEIEWELQKENSKRWNPEIQYTSNYYKSTNVDFAVNTEGTYSEPRPIGTRYLTRNL

SEQ ID NO: 417 - protein, 738 aa, Artificial Sequence; identical to SEQ ID NO: 78
  source: /note="Description of Artificial Sequence: Synthetic polypeptide"

SEQ ID NO: 418 - protein, 728 aa, Artificial Sequence
  source: /note="Description of Artificial Sequence: Synthetic polypeptide"
MAADGYLPDWLEDNLSEGIREWWDLKPGAPKPKANQQKQDDGRGLVLPGYKYLGPFNGLDKGEPVNEADAAALEHDKAYDKQLEQGDNPYLKYNHADAEFQERLQEDTSFGGNLGRAVFQAKKRVLEPLGLVEEGAKTAPGKKRPIESPDSSTGIGRKGQQPAKKKLNFGQTGDSESVPDPQPIGEPPAGPSGLGSGTMAAGGGAPMADNNEGADGVGNASGNWHCDSTWLGDRVITTSTRTWALPTYNNHLYKQISSQSGATNDNHFFGYSTPWGYFDFNRFHCHFSPRDWQRLINNNWGFRPRKLRFKLFNIQVKEVTTNDGVTTIANNLTSTIQVFSDSEYQLPYVLGSAHQGCLPPFPADVFMIPQYGYLTLNNGSQSVGRSSFYCLEYFPSQMLRTGNNFEFSYTFEEVPFHSSYAHSQSLDRLMNPLIDQYLYYLARTQSTTGSTRELQFHQAGPNTMAEQSKNWLPGPCYRQQRLSKNIDSNNNSNFAWTGATKYHLNGRNSLTNPGVAMATNKDDEDQFFPINGVLVFGKTGAANKTTLENVLMTSEEEIKTTNPVATEEYGVVSSNLQSSTAGPQTQTVNSQGALPGMVWQNRDVYLQGPIWAKIPHTDGNFHPSPLMGGFGLKHPPPQILIKNTPVPANPPEVFTPAKFASFITQYSTGQVSVEIEWELQKENSKRWNPEIQYTSNYAKSNNVEFAVNNEGVYTEPRPIGTRYLTRNL

SEQ ID NO: 419 - DNA, 2489 bp, Artificial Sequence
  source: /note="Description of Artificial Sequence: Synthetic polynucleotide"
gaattcgccctttctacggctgcgtcaactggaccaatgagaactttcccttcaacgattgcgtcgacaagatggtgatctggtgggaggagggcaagatgacggccaaggtcgtgaagtccgccaaggccattcatcatctgctggggcgggctcccgagattgcttgctcggcctgcgatctggtcaacgtggacctggatgactgtgtttctgagcaataaatgacttaaaccaggtatggctgccgatggttatcttccagattggctcgaggacaacctctctgagggcattcgcgagtggtgggacttgaaacctggagccccgaaacccaaagccaaccagcaaaagcaggacgacggccggggtctggtgcttcctggctacaagtacctcggacccttcaacggactcgacaagggagagccggtcaacgaggcagacgccgcggccctcgagcacgacaaggcctacgacaagcagctcgagcagggggacaacccgtacctcaagtacaaccacgccgacgccgagtttcaggagcgtcttcaagaagatacgtcttttgggggcaacctcgggcgagcagtcttccaggccaagaagcgggttctcgaacctctcggtctggttgaggaaggcgctaagacggctcctggaaagaagagacccatagaatcccccgactcctccacgggcatcggcaggaaaggccagcagcccgctaaaaagaagctcaactttgggcagactggcgactcagagtcagtgcccgaccctcaaccaatcggagaaccccccgcaggcccctctggtctgggatctggtacaatggctgcaggcggtggcgctccaatggcagacaataacgaaggcgccgacggagtgggtaatgcctccggaaattggcattgcgattccacatggctgggcgacagagtcatcaccaccagcacccgcacctgggccctgcccacctacaacaaccacctctacaagcagatatcaagtcagagcggggctaccaacgacaaccacttcttcggctacagcaccccctggggctattttgacttcaacagattccactgccacttctcaccacgtgactggcagcgactcatcaacaacaactggggattccggcccagaaagctgcggttcaagttgttcaacatccaggtcaaggaggtcacgacgaacgacggcgttacgaccatcgccaataaccttaccagcacgattcaggtcttctcggactcggagtaccaactgccgtacgtcctcggctctgcgcaccagggctgcctccctccgttccctgcggacgtgttcatgattcctcagtacggatatctgactctaaacaacggcagtcagtctgtgggacgttcctccttctactgcctggagtactttccttctcagatgctgagaacgggcaataactttgaattcagctacacctttgaggaagtgcctttccacagcagctatgcgcacagccagagcctggaccggctgatgaatcccctcatcgaccagtacctgtactacctggcccggacccagagcactacggggtccacaagggagctgcagttccatcaggctgggcccaacaccatggccgagcaatcaaagaactggctgcccggaccctgttatcggcagcagagactgtcaaaaaacatagacagcaacaacaacagtaactttgcctggaccggggccactaaataccatctgaatggtagaaattcattaaccaacccgggcgtagccatggccaccaacaaggacgacgaggaccagttctttcccatcaacggagtgctggtttttggcaaaacgggggctgccaacaagacaacgctggaaaacgtgctaatgaccagcgaggaggagatcaaaaccaccaatcccgtggctacagaagaatacggtgtggtctccagcaacctgcaatcgtctacggccggaccccagacacagactgtcaacagccagggggctctgcccggcatggtctggcagaaccgggacgtgtacctgcagggtcccatctgggccaaaattcctcacacggacggcaactttcacccgtctcccctgatgggcggatttggactcaaacacccgcctcctcaaattctcatcaaaaacaccccggtacctgctaatcctccagaggtgtttactcctgccaagtttgcctcatttatcacgcagtacagcaccggccaggtcagcgtggagatcgagtgggaactgcagaaagaaaacagcaaacgctggaatccagagattcagtacacctcaaattatgccaagtctaataatgtggaatttgctgtcaacaacgaaggggtttatactgagcctcgccccattggcacccgttacctcacccgtaacctgtaattgcctgttaatcaataaaccggttaattcgtttcagttgaactttggtcaagggcgaattc

SEQ ID NO: 420 - protein, 728 aa, Artificial Sequence
  source: /note="Description of Artificial Sequence: Synthetic polypeptide"
MAADGYLPDWLEDNLSEGIREWWDLKPGAPKPKANQQKQDDGRGLVLPGYKYLGPFNGLDKGEPVNAADAAALEHDKAYDQQLKAGDNPYLRYNHADAEFQERLQEDTSFGGNLGRAVFQAKKRVLEPLGLVEEGAKTAPGKKRPIESPDSSTGIGKKGQQPAKKKLNFGQTGDSESVPDPQPIGEPPAGPSGLGSGTMAAGGGAPMADNNEGADGVGNASGNWHCDSTWLGDRVITTSTRTWALPTYNNHLYKQISSQSGATNDNHFFGYSTPWGYFDFNRFHCHFSPRDWQRLINNNWGFRPRKLRFKLFNIQVKEVTTNDGVTTIANNLTSTIQVFSDSEYQLPYVLGSAHQGCLPPFPADVFMIPQYGYLTLNNGSQSVGRSSFYCLEYFPSQMLRTGNNFEFSYTFEEVPFHSSYAHSQSLDRLMNPLIDQYLYYLARTQSTTGSTRELQFHQAGPNTMAEQSKNWLPGPCYRRQRLSKDIDSNNNSNFAWTGATKYHLNGRNSLTNPGVAMATNKDDEDQFFPINGVLVFGKTGAANKTTLENVLMTSEEEIKTTNPVATEEYGVVSSNLQSSTAGPQTQTVNSQGALPGMVWQNRDVYLQGPIWAKIPHTDGNFHPSPLMGGFGLKHPPPQILIKNTPVPANPPEVFTPAKFASFITQYSTGQVSVEIEWELQKENSKRWNPEIQYTSNYAKSNNVEFAVNNEGVYTEPRPIGTRYLTRNL

SEQ ID NO: 421 - DNA, 3098 bp, Artificial Sequence
  source: /note="Description of Artificial Sequence: Synthetic polynucleotide"
gaattcgccctttctacggctgcgtcaactggaccaatgagaactttcccttcaacgattgcgtcgacaagatggtgatctggtgggaggagggcaagatgacggccaaggtcgtggagtccgccaaggccattctcggcggcagcaaggtgcgcgtggaccaaaagtgcaagtcttccgcccagatcgatcccacccccgtgatcgtcacttccaacaccaacatgtgcgccgtgattgacgggaacagcaccaccttcgagcaccagcagccgttacaagaccggatgttcaaatttgaactcacccgccgtctggagcacgactttggcaaggtgacaaagcaggaagtcaaagagttcttccgctgggcgcaggatcacgtgaccgaggtggcgcatgagttctacgtcagaaagggtggagccaacaagagacccgcccccgatgacgcggataaaagcgagcccaagcgggcctgcccctcagtcgcggatccatcgacgtcagacgcggaaggagctccggtggactttgccgacaggtaccaaaacaaatgttctcgtcacgcgggcatgcttcagatgctgtttccctgcaagacatgcgagagaatgaatcagaatttcaacatttgcttcacgcacgggaccggagactgttcagaatgtttccccggcgtgtcagaatctcaaccggtcgtcagaaagaggacgtatcggaaactctgtgccattcatcatctgctggggcgggctcccgagattgcttgctcggcctgcgatctggtcaacgtggacctggatgactgtgtttctgagcaataaatgacttaaaccaggtatggctgccgatggttatcttccagattggctcgaggacaacctctctgagggcattcgcgagtggtgggacttgaaacctggagccccgaaacccaaagccaaccagcaaaagcaggacgacggccggggtctggtgcttcctggctacaagtacctcggacccttcaacggactcgacaagggagagccggtcaacgcggcggacgcagcggccctcgagcacgacaaggcctacgaccagcagctcaaagcgggtgacaatccgtacctgcggtataaccacgccgacgccgagtttcaggagcgtcttcaagaagatacgtcttttgggggcaacctcgggcgagcagtcttccaggccaagaagcgggttctcgaacctctcggtctggttgaggaaggcgctaagacggctcctggaaagaagagacccatagaatcccccgactcctccacgggcatcggcaagaaaggccagcagcccgctaaaaagaagctcaactttgggcagactggcgactcagagtcagtgcccgaccctcaaccaatcggagaaccccccgcaggcccctctggtctgggatctggtacaatggctgcaggcggtggcgctccaatggcagacaataacgaaggcgccgacggagtgggtaatgcctccggaaattggcattgcgattccacatggctgggcgacagagtcatcaccaccagcacccgcacctgggccctgcccacctacaacaaccacctctacaagcagatatcaagtcagagcggggctaccaacgacaaccacttcttcggctacagcaccccctggggctattttgacttcaacagattccactgccacttctcaccacgtgactggcagcgactcatcaacaacaactggggattccggcccagaaagctgcggttcaagttgttcaacatccaggtcaaggaggtcacgacgaacgacggcgttacgaccatcgctaataaccttaccagcacgattcaggtcttctcggactcggagtaccaactgccgtacgtcctcggctctgcgcaccagggctgcctccctccgttccctgcggacgtgttcatgattcctcagtacggatatctgactctaaacaacggcagtcagtctgtgggacgttcctccttctactgcctggagtactttccttctcagatgctgagaacgggcaataactttgaattcagctacacctttgaggaagtgcctttccacagcagctatgcgcacagccagagcctggaccggctgatgaatcccctcatcgaccagtacctgtactacctggcccggacccagagcactacggggtccacaagggagctgcagttccatcaggctgggcccaacaccatggccgagcaatcaaagaactggctgcccggaccctgttatcggcggcagagactgtcaaaagacatagacagcaacaacaacagtaactttgcctggaccggggccactaaataccatctgaatggtagaaattcattaaccaacccgggcgtagccatggccaccaacaaggacgacgaggaccagttctttcccatcaacggagtgctggtttttggcaaaacgggggctgccaacaagacaacgctggaaaacgtgctaatgaccagcgaggaggagatcaaaaccaccaatcccgtggctacagaagaatacggtgtggtctccagcaacctgcaatcgtctacggccggaccccagacacagactgtcaacagccagggggctctgcccggcatggtctggcagaaccgggacgtgtacctgcagggtcccatctgggccaaaattcctcacacggacggcaactttcacccgtctcccctgatgggcggatttggactcaaacacccgcctcctcaaattctcatcaaaaacaccccggtacctgctaatcctccagaggtgtttactcctgccaagtttgcctcatttatcacgcagtacagcaccggccaggtcagcgtggagatcgagtgggaactgcagaaagagaacagcaaacgctggaatccagagattcagtacacctcaaattatgccaagtctaataatgtggaatttgctgtcaacaacgaaggggtttatactgagcctcgccccattggcacccgttacctcacccgtaacctgtaattacttgttaatcaataaaccggttgattcgtttcagttgaactttggtctctgcgaagggcgaattc

SEQ ID NO: 422 - protein, 685 aa, Artificial Sequence
  source: /note="Description of Artificial Sequence: Synthetic polypeptide"
MAADGYLPDWLEDNLSEGIREWWDLKPGAPKPKANQQKQDDGRGLVLPGYKYLGPFNGLDKGEPVNEADAAALEHDKAYDKQLEQGDNPYLKYNHADAEFQERLQEDTSFGGNLGRAVFQAKKRVLEPLGLVEEGAKTAPGKKRPVEPSPQRSPDSSTGIGKTGQQPAKKRLNFGQTGDSESVPDPQPIGEPPAGPSGLGSGTMAAGGGAPMADNNEGADGVGSSSGNWHCDSTWLGDRVITTSTRTWALPTYNNHLYKQISNGTSGGSTNDNTYFGYSTPWGYFDFNRFHCHFSPRDWQRLINNNWGFRPKRLNFKLFNIQVKEVTQNEGTKTIANNLTSTIQVFTDSEYQLPYVLGSAHQGCLPPFPADVFMIPQYGYLTLNNGSQAVGRSSFYCLEYFPSQMLRTGNNFEFSYQFEDVPFHSSYAHSQSLDRLTNPLIDQYLYYLARTQSTTGSTRGLQFHQAGPNTMAEQSKNWLPGPCYRQQRLSKNIDSNNNSNFAWTGATKYHLNGRNSLTNPGVAMATNKDDEDQFFPINGVLVFGKTGAANKTTLENVLMTSEEEIKTTNPVATEEYGVVSSNLQSSTAGPQTQTVNSQGALPGMVWQNRDVYLQGPIWAKIPHTDGNFHPSPLMGGFGLKHPPPQILIKYTSNYYKSTNVDFAVNTEGTYSEPRPIGTRYLTRNL

SEQ ID NO: 423 - DNA, 2969 bp, Artificial Sequence
  source: /note="Description of Artificial Sequence: Synthetic polynucleotide"
gaattcgccctttctacggctgcgtcaactggaccaatgagaactttcccttcaacgattgcgtcgacaagatggtgatctggtgggaggagggcaagatgacggccaaggtcgtggagtccgccaaggccattctcggcggcagcaaggtgcgcgtggaccaaaagtgcaagtcgtccgcccagatcgaccccacccccgtgatcgtcacctccaacaccaacatgtgcgccgtgattgacgggaacagcaccaccttcgagcaccagcagccgttacaagaccggatgttcaaatttgaactcacccgccgtctggagcacgactttggcaaggtgacaaagcaggaagtcaaagagttcttccgctgggcgcaggatcacgtgaccgaggtggcgcatgagttctacgtcagaaagggtggagccaacaagagacccgcccccgatgacgcggataaaagcgagcccaagcgggcctgcccctcagtcgcggatccatcgacgtcagacgcggaaggagctccggtggactttgccgacaggtaccaaaacaaatgttctcgtcacgcgggcatgcttcagatgctgtttccctgcaagacatgcgagagaatgaatcagaatttcaacatttgcttcacgcacgggaccagagactgttcagaatgtttccccggcgtgtcagaatctcaaccggtcgtcagaaagaggacgtatcggaaactctgtgccattcatcatctgctggggcgggctcccgagattgcttgctcggcctgcgatctggtcaacgtggacctggatgactgtgtttctgagcaataaatgacttaaaccaggtatggctgccgatggttatcttccagattggctcgaggacaacctctctgagggcatccgcgagtggtgggacttgaaacctggagccccgaaacccaaagccaaccagcaaaagcaggacgacggccggggtctggtgcttcctggctacaagtacctcggacccttcaacggactcgacaagggagagccggtcaacgaggcagacgccgcggccctcgagcacgacaaggcctacgacaagcagctcgagcagggggacaacccgtacctcaagtacaaccacgccgacgccgagtttcaggagcgtcttcaagaagatacgtcttttgggggcaacctcgggcgagcagtcttccaggccaagaagcgggttctcgaacctctcggtctggttgaggaaggcgctaagacggctcctggaaagaagagaccggtagagccatcaccccagcgttctccagactcctctacgggcatcggcaagacaggccagcagcccgcgaaaaagagactcaactttgggcagactggcgactcagagtcagtgcccgaccctcaaccaatcggagaaccccccgcaggcccctctggtctgggatctggtacaatggctgcaggcggtggcgctccaatggcagacaataacgaaggcgccgacggagtgggtagttcctcaggaaattggcattgcgattccacatggctgggcgacagagtcatcaccaccagcacccgaacctgggccctccccacctacaacaaccacctctacaagcaaatctccaacgggacatcgggaggaagcaccaacgacaacacctacttcggctacagcaccccctgggggtattttgactttaacagattccactgccacttctcaccacgtgactggcagcgactcatcaacaacaactggggattccggcccaagagactcaacttcaagctcttcaacatccaggtcaaggaggtcacgcagaatgaaggcaccaagaccatcgccaataaccttaccagcacgattcaggtctttacggactcggaataccagctcccgtacgtcctcggctctgcgcaccagggctgcctgcctccgttcccggcggacgtcttcatgattcctcagtacgggtacctgactctgaacaacggcagtcaggccgtgggccgttcctccttctactgcctggagtactttccttctcaaatgctgagaacgggcaacaactttgagttcagctaccagtttgaggacgtgccttttcacagcagctacgcgcacagccaaagcctggaccggctgacgaaccccctcatcgaccagtacctgtactacctggcccggacccagagcactacggggtccacaagggggctgcagttccatcaggctgggcccaacaccatggccgagcaatcaaagaactggctgcccggaccctgttatcggcagcagagactgtcaaaaaacatagacagcaacaacaacagtaactttgcctggaccggggccactaaataccatctgaatggtagaaattcattaaccaacccgggcgtagccatggccaccaacaaggacgacgaggaccagttctttcccatcaacggagtgctggtttttggcaaaacgggggctgccaacaagacaacgctggaaaacgtgctaatgaccagcgaggaggagatcaaaaccaccaatcccgtggctacagaagaatacggtgtggtctccagcaacctgcaatcgtctacggccggaccccagacacagactgtcaacagccagggggctctgcccggcatggtctggcagaaccgggacgtgtacctgcagggtcccatctgggccaaaattcctcacacggacggcaactttcacccgtctcccctgatgggcggatttggactcaaacacccgcctcctcaaattctcatcaagtatacttccaactactacaaatctacaaatgtggactttgctgtcaatactgagggtacttattcagagcctcgccccattggcacccgttacctcacccgtaacctgtaattgcctgttaatcaataaaccggttaattcgtttcagttgaactttggtctctgcgaagggcgaattc

SEQ ID NO: 424 - protein, 733 aa, Artificial Sequence
  source: /note="Description of Artificial Sequence: Synthetic polypeptide"
MAADGYLPDWLEDNLSEGIREWWDLKPGAPKPKANQQKQDDGRGLVLPGYKYLGPFNGLDKGEPVNAADAAALEHDKAYDQQLKAGDNPYLRYNHADAEFQERLQEDTSFGGNLGRAVFQAKKRVLEPLGLVEEGAKTAPGKKRPIESPDSSTGIGKKGQQPAKKKLNFGQTGDSESVPDPQPIGEPPAGPSGLGSGTMAAGGGAPMADNNEGADGVGSSSGNWHCDSTWLGDRVITTSTRTWALPTYNNHLYKQISNGTSGGSTNDNTYFGYSTPWGYFDFNRFHCHFSPRDWQRLINNNWGFRPKRLNFKLFNIQVKEVTQNEGTKTIANNLTSTIQVFTDSEYQLPYVLGSAHQGCLPPFPADVFMIPQYGYLTLNNGSQAVGRSSFYCLEYFPSQMLRTGNNFEFSYQFEDVPFHSSYAHSQSLDRLMNPLIDQYLYYLSRTQSTGGTAGTQQLLFSQAGPNNMSAQAKNWLPGPCYRQQRVSTTVSQNNNSNFAWTGATKYHLNGRDSLVNPGVAMATHKGDEERFFPSSGVLMFGKQGAGKDNVDYSSVMLTSEEEIKTTNPVATEQYGVVADNLQQQNAAPIVGAVNSQGALPGMVWQNRDVYLQGPIWAKIPHTDGNFHPSPLMGGFGLKHPPPQILIKNTPVPADPPTTFSQAKLASFITQYSTGQVSVEIEWELQKENSKRWNPEIQYTSNYYKSTNVDFAVNTEGTYSEPRPIGTRYLTRSL

SEQ ID NO: 425 - DNA, 3113 bp, Artificial Sequence
  source: /note="Description of Artificial Sequence: Synthetic polynucleotide"
gaattcgccctttctacggctgcgtcaactggaccaatgagaactttcccttcaacgattgcgtcgacaagatggtgatctggtgggaggagggcaagatgacggccaaggtcgtggagtccgccaaggccattctcggcggcagcaaggtgcgcgtggaccaaaagtgcaagtcgtccgcccagatcgatcccacccccgtgatcgtcacttccaacaccaacatgtgcgccgtgattgacgggaacagcaccaccttcgagcaccagcagccgttacaagaccggatgttcaaatttgaactcacccgccgtctggagcatgactttggcaaggtgacaaagcaggaagtcaaagagttcttccgctgggcgcaggatcacgtgaccgaggtggcgcatgagttctacgtcagaaagggtggagccaacaagagacccgcccccgatgacgcggataaaagcgagcccaagcgggcctgcccctcagtcgcggatccatcgacgtcagacgcggaaggagctccggtggactttgccgacaggtaccaaaacaaatgttctcgtcacgcgggcatgcttcagatgctgtttccctgcaagacatgcgagagaatgaatcagaatttcaacatttgcttcacgcacgggaccagagactgttcagaatgtttccccggcgtgtcagaatctcaaccggtcgtcagaaagaggacgtatcggaaactctgtgccattcatcatctgctggggcgggctcccgagattgcttgctcggcctgcgatctggtcaacgtggacctggatgactgtgtttctgagcaataaatgacttaaaccaggtatggctgccgatggttatcttccagattggctcgaggacaacctctctgagggcattcgcgagtggtgggacttgaaacctggagccccgaaacccaaagccaaccagcaaaagcaggacgacggccggggtctggtgcttcctggctacaagtacctcggacccttcaacggactcgacaagggggagcccgtcaacgcggcggacgcagcggccctcgagcacgacaaggcctacgaccagcagctcaaagcgggtgacaatccgtacctgcggtataaccacgccgacgccgagtttcaggagcgtcttcaagaagatacgtcttttgggggcaacctcgggcgagcagtcttccaggccaagaagcgggttctcgaacctctcggtctggttgaggaaggcgctaagacggctcctggaaagaagagacccatagaatcccccgactcctccacgggcatcggcaagaaaggccagcagcccgctaaaaagaagctcaactttgggcagactggcgactcagagtcagtgcccgaccctcaaccaatcggagaaccccccgcaggcccctctggtctgggatctggtacaatggctgcaggcggtggcgctccaatggcagacaataacgaaggcgccgacggagtgggtagttcctcaggaaattggcattgcgattccacatggctgggcgacagagtcatcaccaccagcacccgaacctgggccctccccacctacaacaaccacctctacaagcaaatctccaacgggacatcgggaggaagcaccaacgacaacacctacttcggctacagcaccccctgggggtattttgactttaacagattccactgccacttctcaccacgtgactggcagcgactcatcaacaacaactggggattccggcccaagagactcaacttcaagctcttcaacatccaggtcaaggaggtcacgcagaatgaaggcaccaagaccatcgccaataaccttaccagcacgattcaggtctttacggactcggaataccagctcccgtacgtcctcggctctgcgcaccagggctgcctgcctccgttcccggcggacgtcttcatgattcctcagtacgggtacctgactctgaacaacggcagtcaggccgtgggccgttcctccttctactgcctggagtactttccttctcaaatgctgagaacgggcaacaactttgagttcagctaccagtttgaggacgtgccttttcacagcagctatgcgcacagccaaagcctggaccggctgatgaaccccctcatcgaccagtacctgtactacctgtctcggactcagtccacgggaggtaccgcaggaactcagcagttgctattttctcaggccgggcctaataacatgtcggctcaggccaaaaactggctacccgggccctgctaccggcagcaacgcgtctccacgacagtgtcgcaaaataacaacagcaactttgcttggaccggtgccaccaagtatcatctgaatggcagagactctctggtaaatcccggtgtcgctatggcaacgcacaagggcgacgaagagcgattttttccatccagcggagtcttgatgtttgggaaacagggagctggaaaagacaacgtggactatagcagcgttatgctaaccagtgaggaagaaatcaaaaccaccaacccagtggccacagaacagtacggcgtggtggccgataacctgcaacagcaaaacgccgctcctattgtaggggccgtcaacagtcaaggagccttacctggcatggtctggcagaaccgggacgtgtacctgcagggtcctatctgggccaagattcctcacacggacggcaactttcatccttcgccgctgatgggaggctttggactgaaacacccgcctcctcagatcctgattaagaatacacctgttcccgcggatcctccaactaccttcagtcaagccaagctggcgtcgttcatcacgcagtacagcaccggacaggtcagcgtggaaattgaatgggagctgcagaaagagaacagcaagcgctggaacccagagattcagtatacttccaactactacaaatctacaaatgtggactttgctgtcaatactgagggtacttattcagagcctcgccccattggcacccgttacctcacccgtagcctgtaattgcctgttaatcaataaaccggttgattcgtttcagttgaactttggtctctgcgaagggcgaattc

SEQ ID NO: 426 - protein, 738 aa, Artificial Sequence
  source: /note="Description of Artificial Sequence: Synthetic polypeptide"
MAADGYLPDWLEDNLSEGIREWWDLKPGAPKPKANQQKQDDGRGLVLPGYKYLGPFNGLDKGEPVNAADAAALEHDKAYDQQLKAGDNPYLRYNHADAEFQERLQEDTSFGGNLGRAVFQAKKRVLEPLGLVEEGAKTAPGKKRPVEPSPQRSPDSSTGIGKTGQQPAKKRLNFGQTGDSESVPDPQPIGEPPAGPSGLGSGTMAAGGGAPMADNNEGADGVGSSSGNWHCDSTWLGDRVITTSTRTWALPTYNNHLYKQISNGTSGGSTNDNTYFGYSTPWGYFDFNRFHCHFSPRDWQRLINNNWGFRPKRLNFKLFNIQVKEVTQNEGTKTIANNLTSTIQVFTDSEYQLPYVLGSAHQGCPPPFPADVFMIPQYGYLTLNNGSQAVGRSSFYCLEYFPSQMRRTGNNFEFSYQFEDVPFHSSYAHSQSLDRLMNPLIDQYLYYLSRTQSTGGTAGTQQLLFSQAGPNNMSAQAKNWLPGPCYRQQRVSTTLSQNNNSNFAWTGATKYHLNGRDSLVNPGVAMATHKDDEERFFPSSGVLMFGKQGAGKDNVDYSSVMLTSEEEIKTTNPVATEQYGVVADNLQQQNAAPIVGAVNSQGALPGMVWQNRDVYLQGPIWAKIPHTDGNFHPSPLMGGFGLKHPPPQILIKNTPVPADPPTTFSQAKLASFITQYSTGQVSVEIEWELQKENSKRWNPEIQYTSNYYKSTNVDFAVNTEGTYSEPRPIGTRYLTRNL

SEQ ID NO: 427 - DNA, 3128 bp, Artificial Sequence
  source: /note="Description of Artificial Sequence: Synthetic polynucleotide"
gaattcgccctttctacggctgcgtcaactggaccaatgagaactttcccttcaacgattgcgtcgacaagatggtgatctggtgggaggagggcaagatgacggccaaggtcgtggagtccgccaaggccattctcggcggcagcaaggtgcgcgtggaccaaaagtgcaagtcgtccgcccagatcgaccccacccccgtgatcgtcacctccaacaccaacatgtgcgccgtgattgacgggaacagcaccaccttcgagcaccagcagccgttgcaggaccggatgttcaaatttgaactcacccgccgtctggagcatgactttggcaaggtgacaaagcaggaagtcaaagagttcttccgctgggcgcaggatcacgtgaccgaggtggcgcatgagttctacgtcagaaagggtggagccaacaagagacccgcccccgatgacgcggataaaagcgagcccaagcgggcctgcccctcagtcgcggatccatcgacgtcagacgcggaaggagctccggtggactttgccgacaggtaccaaaacaaatgttctcgtcacgcgggcatgcttcagatgctgtttccctgcaagacatgcgagagaatgaatcagaatttcaacatttgcttcacgcgcgggaccagagactgttcagaatgtttcccgggcgtgtcagaatctcaaccggtcgtcagaaagaggacgtatcggaaactctgtgccattcatcatctgctggggcgggctcccgagattgcttgctcggcctgcgatctggtcaacgtggacctggatgactgtgtttctgagcaataaatgacttaaaccaggtatggctgccgatggttatcttccagattggctcgaggacaacctctctgagggcattcgcgagtggtgggacttgaaacctggagccccgaaacccaaagccaaccagcaaaagcaggacgacggccggggtctggtgcttcctggctacaagtacctcggacccttcaacggactcgacaagggggagcccgtcaacgcggcggacgcagcggccctcgagcacgacaaggcctacgaccagcagctcaaagcgggtgacaatccgtacctgcggtataaccacgccgacgccgagtttcaggagcgtctgcaagaagatacgtcttttgggggcaacctcgggcgagcagtcttccaggccaagaagcgggttctcgaacctctcggtctggttgaggaaggcgctaagacggctcctggaaagaagagaccggtagagccatcaccccagcgttctccagactcctctacgggcatcggcaagacaggccagcagcccgcgaaaaagagactcaactttgggcagactggcgactcagagtcagtgcccgaccctcaaccaatcggagaaccccccgcaggcccctctggtctgggatctggtacaatggctgcaggcggtggcgctccaatggcagacaataacgaaggcgccgacggagtgggtagttcctcaggaaattggcattgcgattccacatggctgggcgacagagtcatcaccaccagcacccgaacctgggccctccccacctacaacaaccacctctacaagcaaatctccaacgggacatcgggaggaagcaccaacgacaacacctacttcggctacagcaccccctgggggtattttgactttaacagattccactgccacttctcaccacgtgactggcagcgactcatcaacaacaactggggattccggcccaagagactcaacttcaagctcttcaacatccaggtcaaggaggtcacgcagaatgaaggcaccaagaccatcgccaataaccttaccagcacgattcaggtctttacggactcggaataccagctcccgtacgtcctcggctctgcgcaccagggctgcccgcctccgttcccggcggacgtcttcatgattcctcagtacgggtacctgactctgaacaacggcagtcaggccgtgggccgttcctccttctactgcctggagtactttccttctcaaatgcggagaacgggcaacaactttgagttcagctaccagtttgaggacgtgccttttcacagcagctacgcgcatagccaaagcctggaccggctgatgaaccccctcatcgaccagtacctgtactacctgtctcggactcagtccacgggaggtaccgcaggaactcagcagttgctattttctcaggccgggcctaataacatgtcggctcaggccaaaaactggctacccgggccctgctaccggcagcaacgcgtctccacgacactgtcgcaaaataacaacagcaactttgcttggaccggtgccaccaagtatcatctgaatggcagagactctctggtaaatcccggtgtcgctatggcaacgcacaaggacgacgaagagcgattttttccatccagcggagtcttgatgtttgggaaacagggagctggaaaagacaacgtggactatagcagcgttatgctaaccagtgaggaagaaatcaaaaccaccaacccagtggccacagaacagtacggcgtggtggccgataacctgcaacagcaaaacgccgctcctattgtaggggccgtcaacagtcaaggagccttacctggcatggtctggcagaaccgggacgtgtacctgcagggtcctatctgggccaagattcctcacacggacggcaactttcatccttcgccgctgatgggaggctttggactgaaacacccgcctcctcagatcctgattaagaatacacctgttcccgcggatcctccaactaccttcagtcaagccaagctggcgtcgttcatcacgcagtacagcaccggacaggtcagcgtggaaattgaatgggagctgcagaaagagaacagcaagcgctggaacccagagattcagtatacttccaactactacaaatctacaaatgtggactttgctgtcaatactgagggtacttattcagagcctcgccccattggcacccgttacctcacccgtaacctgtaattgcctgttaatcaataaaccggttaattcgtttcagttgaactttggtctctgcgaagggcgaattc

SEQ ID NO: 428 - protein, 738 aa, Artificial Sequence; identical to SEQ ID NO: 416
  source: /note="Description of Artificial Sequence: Synthetic polypeptide"

SEQ ID NO: 429 - DNA, 1933 bp, Artificial Sequence
  source: /note="Description of Artificial Sequence: Synthetic polynucleotide"
  modified_base (1302)..(1302): a, c, g, or t
caaggcctacgaccagcagctcaaagcgggtgacaatccgtacctgcggtataaccacgccgacgccgagtttcaggagcgtcttcaagaagatacgtcttttgggggcaacctcgggcgagcagtcttccaggccaaaaagcgggttctcgaacctcttggtctggttgagacgccagctaagacggcacctggaaagaagcgaccggtagactcgccagactccacctcgggcatcggcaagaaaggccagcagcccgcgaaaaagagactcaactttgggcagactggcgactcagagtcagtccccgaccctcaaccaatcggagaaccaccagcaggcccctctggtctgggatctggtacaatggctgcaggcggtggcgcaccaatggctgacaataacgagggcgccgacggagtgggtaatgcctcaggaaattggcattgcgattccacatggctgggcgacagagtcatcaccaccagcacccgaacctgggccctgcccacctacaacaaccacctctacaagcaaatctccagtcagtcagcagggagcaccaacgataacgtctatttcggctacagcaccccctgggggtattttgacttcaacagattccattgccacttctcaccacgtgactggcagcgacttatcaacaacaactggggattccggcccaagaagctcaacttcaagctcttcaacatccaggtcaaggaggtcacgacgaatgacggtgtcacaaccatcgctaataaccttaccagcacggttcaggtcttttcggactcggaatatcaactgccgtacgtcctcggctccgcgcaccagggctgcctgcctccgttcccggcagacgtgttcatgattccgcagtacggatacctgactctgaacaatggcagccaatcggtaggccgttcctccttctactgcctggagtactttccttctcagatgctgagaacgggcaacaacttcacctttagctacaccttcgaggacgtgcctttccacagcagctacgcgcacagccagagtctggaccggctgatgaatcccctcatcgaccagtacctgtactacttggccagaacacagagcaacgcaggaggtactgctggcaatcgggaactgcagttttatcagggcggacctaccaccatggccgaacaagcaaagaactggctgcccggaccttgcttccggcaacagagagtatccaagacgctggatcaaaataacaacagcaactttgcctggactggtgccacaaaataccatttaaatgnaagaaattcattggttaatcccggtgtcgccatggcaacccacaaggacgacgaggaacgcttcttcccttcgagcggagttctaatttttggcaaaactggagcagctaataaaactacattagaaaacgtgctcatgacaaatgaagaagaaattcgtcctaccaacccggtagctaccgaggaatacgggattgtaagcagcaacttgcaggcggctagcaccgcagcccagacacaagttgttaacaaccagggagccttacctggcatggtctggcagaaccgggacgtgtacctgcaaggtcccatttgggccaagattcctcacacggacggcaactttcacccgtctcctctaatgggtggctttggactgaaacacccgcctccccagatcctgatcaaaaacacaccggtacctgctaatcctccagaagtgtttactcctgccaagtttgcttccttcatcacgcagtacagcaccgggcaagtcagcgttgagatcgagtgggagctgcagaaagagaacagcaagcgctggaacccagagattcagtacacctccaactttgacaaacagactggagtggactttgctgttgacagccagggtgtttactctgagcct

SEQ ID NO: 430 - protein, 733 aa, Artificial Sequence
  source: /note="Description of Artificial Sequence: Synthetic polypeptide"
MAADGYLPDWLEDNLSEGIREWWDLKPGAPKPKANQQKQDDGRGLVLPGYKYLGPFNGLDKGEPVNAADAAALEHDKAYDQQLKAGDNPYLRYNHADAEFQERLQEDTSFGGNLGRAVFQAKKRVLEPLGLVEEGAKTAPGKKRPLESPQEPDSSSGIGKKGKQPAKKRLNFEEDTGAGDGPPEGSDTSAMSSDIEMRAAPGGNAVDAGQGSDGVGNASGDWHCDSTWSEGKVTTTSTRTWVLPTYNNHLYLRLGTTSNSNTYNGFSTPWGYFDFNRFHCHFSPRDWQRLINNNWGLRPKAMRVKIFNIQVKEVTTSNGETTVANNLTSTVQIFADSSYELPYVMDAGQEGSLSPFPNDVFMVPQYGYCGIVTGENQNQTDRNAFYCLEYFPSQMLRTGNNFEMAYNFGKVPFHSMYAYSQSPDRLMNPLLDQYLWHLQSTTSGETLNQGNAATTFGKIRSGDFAFYRKNWLPGPCVKQQRLSKTASQNYKIPASGGNALLKYDTHYTLNNRWSNIAPGPPMATAGPSDGDFSNAQLIFPGPSVTGNTTTSANNLLFTSEEEIAATNPRDTDMFGQIADNNQNATTAPITGNVTAMGVLPGMVWQNRDIYYQGPIWAKIPHADGHFHPSPLIGGFGLKHPPPQIFIKNTPVPANPATTFTAARVDSFITQYSTGQVAVQIEWEIEKERSKRWNPEVQFTSNYGNQSSMLWAPDTTGKYTEPRVIGSRYLTNHL

SEQ ID NO: 431 - DNA, 3105 bp, Artificial Sequence
  source: /note="Description of Artificial Sequence: Synthetic polynucleotide"
gaattcgcccttgctgcgtcaactggaccaatgagaactttcccttcaacgattgcgtcgacaagatggtgatctggtgggaggagggcaagatgaccgccaaggtcgtggagtccgccaaggccattctgggcggaagcaaggtgcgcgtggaccaaaagtgcaagtcatcggcccagatcgaccccacgcccgtgatcgtcacctccaacaccaacatgtgcgccgtgatcgacgggaacagcaccaccttcgagcaccagcagccgctgcaggaccgcatgttcaagttcgagctcacccgccgtctggagcacgactttggcaaggtgaccaagcaggaagtcaaagagttcttccgctgggctcaggatcacgtgactgaggtggcgcatgagttctacgtcagaaagggcggagccaccaaaagacccgcccccagtgacgcggatataagcgagcccaagcgggcctgcccctcagttgcggagccatcgacgtcagacgcggaagcaccggtggactttgcggacaggtaccaaaacaaatgttctcgtcacgcgggcatgcttcagatgctgtttccctgcaagacatgcgagagaatgaatcagaatttcaacgtctgcttcacgcacggggtcagagactgctcagagtgcttccccggcgcgtcagaatctcaacccgtcgtcagaaaaaagacgtatcagaaactgtgcgcgattcatcatctgctggggcgggcacccgagattgcgtgttcggcccgcgatctcgtcaacgtggacttggatgactgtgtttctgagcaataaatgacttaaaccaggtatggctgctgacggttatcttccagattggctcgaggacaacctctctgagggcattcgcgagtggtgggacctgaaacctggagcccccaagcccaaggccaaccagcagaagcaggacgacggccggggtctggtgcttcctggctacaagtacctcggacccttcaacggactcgacaagggggagcccgtcaacgcggcggacgcagcggccctcgagcacgacaaggcctacgaccagcagctcaaagcgggtgacaatccgtacctgcggtataaccacgccgacgccgagtttcaggagcgtctgcaagaagatacgtcttttgggggcaacctcgggcgagcagtcttccaggccaagaagagggtactcgaacctctgggcctggttgaagaaggtgctaagacggctcctggaaagaagagaccgttagagtcaccacaagagcccgactcctcctcaggaatcggcaaaaaaggcaaacaaccagccaaaaagagactcaactttgaagaggacactggagccggagacggaccccctgaaggatcagataccagcgccatgtcttcagacattgaaatgcgtgcagcaccgggcggaaatgctgtcgatgcgggacaaggttccgatggagtgggtaatgcctcgggtgattggcattgcgattccacctggtctgagggcaaggtcacaacaacctcgaccagaacctgggtcttgcccacctacaacaaccacttgtacctgcggctcggaacaacatcaaacagcaacacctacaacggattctccaccccctggggatactttgactttaacagattccactgtcacttctcaccacgtgactggcaaagactcatcaacaacaactggggactacgaccaaaagccatgcgcgttaaaatcttcaatatccaagttaaggaggtcacaacgtcgaacggcgagactacggtcgctaataaccttaccagcacggttcagatatttgcggactcgtcgtatgagctcccgtacgtgatggacgctggacaagagggaagtctgtctcctttccccaatgacgtcttcatggtgcctcaatatggctactgtggcattgtgactggcgaaaatcagaaccagacggacagaaatgctttctactgcctggagtattttccttcacaaatgctgagaactggcaataactttgaaatggcttacaactttgggaaggtgccgttccactcaatgtatgcttacagccagagcccggacagactgatgaatcccctcctggaccagtacctgtggcacttacagtcgaccacctctggagagactctgaatcaaggcaatgcagcaaccacatttggaaaaatcaggagtggagactttgccttttacagaaagaactggctgcctgggccttgtgttaaacagcagagactctcaaaaactgccagtcaaaattacaagattcctgccagcgggggcaacgctctgttaaagtatgacacccactataccttaaacaaccgctggagcaacatagcgcctggacctccaatggcaacagctggaccttcagatggggacttcagcaacgcccagctcatcttccctggaccatcagtcaccggaaacacaacaacctcagcaaacaatctgttgtttacatcagaagaagaaattgctgccaccaacccaagagacacggacatgtttggtcagattgctgacaataatcagaatgctacaactgctcccataaccggcaacgtgactgctatgggagtgcttcctggcatggtgtggcaaaacagagacatttactaccaagggccaatttgggccaagatcccacacgcggacggacattttcatccttcaccgctaattggcggttttggactgaaacatccgcctccccagatatttatcaaaaacacccccgtacctgccaatcctgcgacaaccttcactgcagccagagtggactctttcatcacacaatacagcaccggccaggtcgctgttcagattgaatgggaaatcgaaaaggaacgctccaaacgctggaatcctgaagtgcagtttacttcaaactatgggaaccagtcttctatgttgtgggctcccgatacaactgggaagtatacagagccgcgggttattggctctcgttatttgactaatcatttgtaactgcctagttaatcaataaaccgtgtgattcgtttcagttgaactttggtctctgcgaagggcgaattc

SEQ ID NO: 432 - protein, 733 aa, Artificial Sequence
  source: /note="Description of Artificial Sequence: Synthetic polypeptide"
MAADGYLPDWLEDNLSEGIREWWDLKPGAPKPKANQQKQDDGRGLVLPGYKYLGPFNGLDKGEPVNAADAAALEHDKAYDQQLKAGDNPYLRYNHADAEFQERLQEDTSFGGNLGRAVFQAKKRVLEPLGLVEEGAKTAPGKKRPLESPQEPDSSSGIGKKGKQPAKKRLNFEEDTGAGDGPPEGSDTSAMSSDIEMRAAPGGNAVDAGQGSDGVGNASGDWHCDSTWSEGKVTTTSTRTWVLPTYNNHLYLRLGTTSNSNTYNGFSTPWGYFDFNRFHCHFSPRDWQRLINNNWGLRPKAMRVKIFNIQVKEVTTSNGETTVANNLTSTVQIFADSSYELPYVMDAGQEGSLPPFPNDVFMVPQYGYCGIVTGENQNQTDRNAFYCLEYFPSQMLRTGNNFEMAYNFEKVPFHSMYAHSQSLDRLMNPLLDQYLWHLQSTTSGETLNQGNAATTFGKIRSGDFAFYRKNWLPGPCVKQQRFSKTASQNYKIPASGGNALLKYDTHYTLNNRWSNIAPGPPMATAGPSDGDFSNAQLIFPGPSVTGNTTTSANNLLFTSEEEIAATNPRDTDMFGQIADNNQNATTAPITGNVTAMGVLPGMVWQNRDIYYQGPIWAKIPHADGHFHPSPLIGGFGLKHPPPQIFIKNTPVPANPATTFTAARVDSFITQYSTGQVAVQIEWEIEKERSKRWNPEVQFTSNYGNQSSMLWAPDTTGKYTEPRVIGSRYLTNHL

SEQ ID NO: 433 - DNA, 3105 bp, Artificial Sequence
  source: /note="Description of Artificial Sequence: Synthetic polynucleotide"
gaattcgcccttgctgcgtcaactggaccaatgagaactttcccttcaacgattgcgtcgacaagatggtgatctggtgggaggagggcaagatgaccgccaaggtcgtggagtccgccaaggccattctgggcggaagcaaggtgcgcgtggaccaaaagtgcaagtcatcggcccagatcgaccccacgcccgtgatcgtcacctccaacaccaacatgtgcgccgtgatcgacgggaacagcaccaccttcgagcaccagcagccgctgcaggaccgcatgttcaagttcgagctcacccgccgtctggagcacgactttggcaaggtgaccaagcaggaagtcaaagagttcttccgctgggctcaggatcacgtgactgaggtggcgcatgagttctacgtcagaaagggcggagccaccaaaagacccgcccccagtgacgcggatataagcgagcccaagcgggcctgcccctcagttgcggagccatcgacgtcagacgcggaagcaccggtggactttgcggacaggtaccaaaacaaatgttctcgtcacgcgggcatgcttcagatgctgtttccctgcaagacatgcgagagaatgaatcagaatttcaacgtctgcttcacgcacggggtcagagactgctcagagtgcttccccggcgcgtcagaatctcaacccgtcgtcagaaaaaagacgtatcagaaactgtgcgcgattcatcatctgctggggcgggcacccgagattgcgtgttcggcctgcgatctcgtcaacgtggacttggatgactgtgtttctgagcaataaatgacttaaaccaggtatggctgctgacggttatcttccagattggctcgaggacaacctctctgagggcattcgcgagtggtgggacctgaaacctggagcccccaagctcaaggccaaccagcagaagcaggacgacggccggggtctggtgcttcctggctacaagtacctcggacccttccacggactcgacaagggggagcccgtcaacgcggcggacgcagcggccctcgagcacgacaaggcctacgaccagcagctcaaagcgggtgacaatccgtacctgcggtataaccacgccgacgccgagtttcaggagcgtctgcaagaagatacgtcttttgggggcaacctcgggcgagcagtcttccaggccaagaagagggtactcgaaccactgggcctggttgaagaaggtgctaagacggctcctggaaagaagagaccgttagagtcaccacaagagcccgactcctcctcaggaatcggcaaaaaaggcaaacaaccagccaaaaagagactcaactttgaagaggacactggagccggagacggaccccctgaaggatcagataccagcgccatgtcttcagacattgaaatgcgtgcagcaccgggcggaaatgctgtcgatgcgggacaaggttccgatggagtgggtaatgcctcgggtgattggcattgcgattccacctggtctgagggcaaggtcacaacaacctcgaccagaacctgggtcttgcccacctacaacaaccacttgtacctgcggctcggaacaacatcaaacagcaacacctacaacggattctccaccccctggggatactttgactttaacagattccactgtcacttctcaccacgtgactggcaaagactcatcaacaacaactggggactacgaccaaaagccatgcgcgttaaaatcttcaatatccaagttaaggaggtcacaacgtcgaacggcgagactacggtcgctaataaccttaccagcacggttcagatatttgcggactcgtcgtatgagctcccgtacgtgatggacgctggacaagagggaagtctgcctcctttccccaatgacgtcttcatggtgcctcaatatggctactgtggcattgtgactggcgaaaatcagaaccagacggacagaaatgctttctactgcctggagtattttccttcacaaatgctgagaactggcaataactttgaaatggcttacaactttgagaaggtgccgttccactcaatgtatgctcacagccagagcctggacagactgatgaatcccctcctggaccagtacctgtggcacttacagtcgaccacctctggagagactctgaatcaaggcaatgcagcaaccacatttggaaaaatcaggagtggagactttgccttttacagaaagaactggctgcctgggccttgtgttaaacagcagagattctcaaaaactgccagtcaaaattacaagattcctgccagcgggggcaacgctctgttaaagtatgacacccactataccttaaacaaccgctggagcaacatagcgcctggacctccaatggcaacagctggaccttcagatggggacttcagcaacgcccagctcatcttccctggaccatcagtcaccggaaacacaacaacctcagcaaacaatctgttgtttacatcagaaggagaaattgctgccaccaacccaagagacacggacatgtttggtcagattgctgacaataatcagaatgctacaactgctcccataaccggcaacgtgactgctatgggagtgcttcctggcatggtgtggcaaaacagagacatttactaccaagggccaatttgggccaagatcccacacgcggacggacattttcatccttcaccgctaattggcggttttggactgaaacatccgcctccccagatatttatcaaaaacacccccgtacctgccaatcctgcgacaaccttcactgcagccagagtggactctttcatcacacaatacagcaccggccaggtcgctgttcagattgaatgggaaatcgaaaaggaacgctccaaacgccggaatcctgaagtgcagtttacttcaaactatgggaaccagtcttctatgttgtgggctcccgatacaactgggaagtatacagagccgcgggttattggctctcgttatttgactaatcatttgtaactgcctagttaatcaataaaccgtgtgattcgtttcagttgaactttggtctctgcgaagggcgaattc

SEQ ID NO: 434 - protein, 733 aa, Artificial Sequence
  source: /note="Description of Artificial Sequence: Synthetic polypeptide"
MAADGYLPDWLEDNLSEGIREWWDLKPGAPKPKANQQKQDDGRGLVLPGYEYLGPFNGLDKGEPVNAADAAALEHDKAYDQQLKAGDNPYLRYNHADAEFQERLQEDTSFGGNLGRAVFQAKKRVLEPLGLVEEGAKTAPGKKRPLESPQEPDSSSGIGKKGKQPAKKRLNFEEDTGAGDGPPEGSDTSAMSSDIEMRAAPGGNAVDAGQGSDGVGNASGDWHCDSTWSEGKVTTTSTRTWVLPTYNNHLYLRLGTTSNSNTYNGFSTPWGYFDFNRFHCHFSPRDWQRLINNNWGLRPKAMRVKIFNIQVKEVTTSNGETTVANNLTSTVQIFADSSYELPYVMDAGQEGSLPPFPNDVFMVPQYGYCGIVTGENQNQTDRNAFYCLEYFPSQMLRTGNNFETAYNFEKVPFHSMYAHSQSLDGLMNPLLDQYLWHLQSTTSGETLNQGNAATTFGKIRSGDFAFYRKNWLPGPCVKQQRFSKTASQNYKIPASGGNALLKYDTHYTLNNRWSNIAPGPPMATAGPSDGDFSNAQLIFPGPSVTGNTTTSANNLLFTSEEEIAATNPRDTDMFGQIADNNQNATTAPITGNVTAMGVLPGMVWQNRDIYYQGPIWAKIPHADGHFHPSPLIGGFGLKHPPPQIFIKNTPVPAYPATTFTAARVDSFITQYSTGQVAVQIEWEIEKERSKRWNPEVQFTSNCGNQSSMLWAPDTTGKYTEPRVIGSRYLTNHL

SEQ ID NO: 435 - DNA, 3105 bp, Artificial Sequence
  source: /note="Description of Artificial Sequence: Synthetic polynucleotide"
gaattcgcccttcgcagagaccaaagttcaactgaaacgaatcacacggtttattgattaactaggcagttacaaatgattagtcaaataacgagagccaataacccgcggctctgtatacttcccagttgtatcgggagcccacaacatagaagactggttcccacagtttgaagtaaactgcacttcaggattccagcgtttggagcgttccttttcgatttcccattcaatctgaacagcgacctggccggtgctgtattgtgtgatgaaagagtccactctggctgcagtgaaggttgtcgcaggataggcaggtacgggggtgtttttgataaatatctggggaggcggatgtttcagtccaaaaccgccaattagcggtgaaggatgaaaatgtccgtccgcgtgtgggatcttggcccaaattggcccttggtagtaaatgtctctgttttgccacaccatgccaggaagcactcccatagcagtcacgttgccggttatgggagcagttgtagcattctgattattgtcagcaatctgaccaaacatgtccgtgtctcttgggttggtggcagcaatttcttcttctgatgtaaacaacagattgtttgctgaggttgttgtgtttccggtgactgatggtccagggaagatgagctgggcgttgctgaagtccccatctgaaggtccagctgttgccattggaggtccaggcgctatgttgctccagcggttgtttaaggtatagtgggtgtcatactttaacagagcgttgcccccgctggcaggaatcttgtaattttgactggcagtttttgagaatctctgctgtttaacacaaggcccaggcagccagttctttctgtaaaaggcaaagtctccactcctgatttttccaaatgtggttgctgcattgccttgattcagagtctctccagaggtggtcgactgtaagtgccacaggtactggtccaggaggggattcatcagtccgtccaggctctggctgtgagcatacattgagtggaacggcaccttctcaaagttgtaagccgtttcaaagttattgccagttctcagcatttgtgaaggaaaatactccaggcagtagaaagcatttctgtccgtctggttctgattttcgccagtcacaatgccacagtagccatattgaggcaccatgaagacgtcattggggaaaggaggcagacttccctcttgtccagcgtccatcacgtacgggagctcatacgacgagtccgcaaatatctgaaccgtgctggtaaggttattagcgaccgtagtctcgccgttcgacgttgtgacctccttaacttggatattgaagattttaacgcgcatggcttttggtcgtagtccccagttgttgttgatgagtctttgccagtcacgtggtgagaagtgacagtggaatctgttaaagtcaaagtatccccagggggtggagaatccgttgtaggtgttgctgtttgatgttgttccgagccgcaggtacaagtggttgttgtaggtgggcaagacccaggttctggtcgaggttgttgtgaccttgccctcagaccaggtggaatcgcaatgccaatcacccgaggcattacccactccatcggaaccttgtcccgcatcgacagcatttccgcccggtgctgcacgcatttcaatgtctgaagacatggcgctggtatctgatccttcagggggtccgtctccggctccagtgtcctcttcaaagttgagtctctttttggctggttgtttgccttttttgccgattcctgaggaggagtcgggctcttgtggtgactctaacggtctcttctttccaggagccgtcttagcaccttcttcaaccaggcccagaggttcgagtaccctcttcttggcctggaagactgctcgcccgaggttgcccccaaaagacgtatcttcttgcagacgctcctgaaactcggcgtcggcgtggttataccgcaggtacggattgtcacccgctttgagctgctggtcgtaggccttgtcgtgctcgagggccgctgcgtccgccgcgttgacgggctcccccttgtcgagtccgttgaagggtccgaggtactcgtagccaggaagcaccagaccccggccgtcgtcctgcttctgctggttggccttgggcttgggggctccaggtttcaggtcccaccactcgcgaatgccctcagagaggttgtcctcgagccaatctggaagataaccgtcagcagccatacctggtttaagtcatttattgctcagaaacacagtcatccaagtccacgttgacgagatcgcaggccgaacacgcaatctcgggtgcccgccccagcagatgatgaatcgcgcacagtttctgatacgtcttttttctgacgacgggttgagattctgacgcgccggggaagcactctgagcagtctctgaccccgtgcgtgaagcagacgttgaaattctgattcattctctcgcatgtcttgcagggaaacagcatctgaagcatgcccgcgtgacgagaacatttgttttggtacctgtccgcaaggtccaccggtgcttccgcgtctgacgtcgatggctccgcaactgaggggcaggcccgcttgggctcgcttatatccgcgtcactgggggcgggtcttttggtggctccgccctttctgacgtagaactcatgcgccacctcagtcacgtgatcctgagcccagcggaagaactctttgacttcctgcttggtcaccttgccaaagtcgtgctccagacggcgggtgagctcgaacttgaacatgcggtcctgcagcggctgctggtgctcgaaggtggtgctgttcccgtcgatcacggcgcacatgttggtgttggaggtgacgatcacgggcgtggggtcgatctgggccgatgacttgcacttttggtccacgcgcaccttgcttccgcccagaatggccttggcggactccacgaccttggcggtcatcttgccctcctcccaccagatcaccatcttgtcgacgcaatcgttgaagggaaagttctcattggtccagttgacgcagcaagggcgaattc

SEQ ID NO: 436 - protein, 729 aa, Artificial Sequence
  source: /note="Description of Artificial Sequence: Synthetic polypeptide"
MAADGYLPDWLEDNLSEGIREWWDLKPGAPKPKANQQKQDDGRGLVLPGYKYLGPFNGLDKGEPVNAADAAALEHDKAYDQQLKAGDNPYLRYNHADAEFQERLQEDTSFGGNLGRAVFQAKKRVLEPLGLVEEGAKTAPGKKRPIDSPDSSTGIGKKGQQPAKKKLNFGQTGDSESVPDPQPLGEPPAAPSSVGSGTMAAGGGAPMADNNEGADGVGNASGNWHCDSTWLGDRVITTSTRTWALPTYNNHLYKQISSSSSGATNDNHYFGYSTPWGYFDFNRFHCHFSPRDWQRLINNNWGFRPKKLRFKLFNIQVKEVTTNDGVTTIANNLTSTVQVFSDSEYQLPYVLGSAHQGCLPPFPADVFMIPQYGYLTLNNGSQSVGRSSFYCLEYFPSQMLRTGNNFEFSYSFEDVPFHSSYAHSQSLDRLMNPLIDQYLYYLARTQSTTGSTRELQFHQAGPNTMAEQSKNWLPGPCYRQQGLSKNLDFNNNSNFAWTAATKYHLNGRNSLTNPGIPMATNKDDEDQFFPINGVLVFGKTGAANKTTLENVLMTSEEEIKTTNPVATEEYGVVSSNLQPSTAGPQSQTINSQGALPGMVWQNRDVYLQGPIWAKIPHTDGNFHPSPLMGGFGLKHPPPQILIKNTPVPANPPEVFTPAKFASFITQYSTGQVSVEIEWELQKENSKRWNPEIQYTSNYAKSNNVEFAVNPDGVYTEPRPIGTRYLPRNL

SEQ ID NO: 437 - DNA, 3094 bp, Artificial Sequence
  source: /note="Description of Artificial Sequence: Synthetic polynucleotide"
gaattcgcccttgctgcgtcaactggaccaagagaactttcccttcaacgattgcgtcgacaagatggtgatctggtgggaggagggcaagatgacggccaaggtcgtggagtccgccaaagccattctgggcggaagcaaggtgcgcgtcgaccaaaagtgcaagtcctcggcccagatcgatcccacccccgtgatcgtcacctccaacaccaacatgtgcgccgtgatcgacgggaacagcaccaccttcgagcaccagcagccgttgcaggaccggatgttcaaatttgaactcacccgccgtctggaacacgactttggcaaggtgaccaagcaggaagtcaaagagttcttccgctgggctagtgatcacgtgactgaggtgacgcatgagttctacgtcagaaagggcggagccagcaaaagacccgcccccgatgacgcggatataagcgagcccaagcgggcctgtccctcagtcacggacccatcgacgtcagacgcggaaggagctccggtggactttgccgacaggtaccaaaacaaatgttctcgtcacgcgggcatgcttcagatgctgtttccctgcaaaacgtgcgagagaatgaatcagaatttcaacatttgcttcacgcacggggtcagagactgtttagaatgtttccccggcgtgtcagaatctcaaccggtcgtcagaaaaaagacgtatcggaagctgtgtgcgattcatcatctgctggggcgggcacccgagattgcttgctcggcctgcgacctggtcaacgtggacctggacgactgtgtttctgagcaataaatgacttaaaccgggtatggctgccgatggttatcttccagattggctcgaggacaacctctctgagggcattcgcgagtggtgggacctgaaacctggagccccgaaacccaaagccaaccagcaaaagcaggacgacggccggggtctggtgcttcctggctacaagtacctcggacccttcaacggactcgacaagggggagcccgtcaacgcggcggacgcagcggccctcgagcacgacaaggcctacgaccagcagctcaaagcgggtgacaatccgtacctgcggtataaccacgccgacgccgagtttcaggagcgtctgcaagaagatacgtcatttgggggcaacctcgggcgagcagtcttccaggccaagaagcgggttctcgaacctctcggtctggttgaggaaggcgctaagacggctcctggaaagaagagacccatagactctccagactcctccacgggcatcggcaaaaaaggccagcagcccgctaaaaagaagctcaattttggtcagactggcgactcagagtcagtccccgaccctcaacctcttggagaacctccagcagcgccctctagtgtgggatctggtacaatggctgcaggcggtggcgcaccaatggcagacaataacgaaggtgccgacggagtgggtaatgcctcaggaaattggcattgcgattccacatggctgggcgacagagtcatcaccaccagcaccagaacctgggccctccccacctacaacaaccacctctacaagcaaatctccagcagcagctcaggagccaccaatgacaaccactacttcggctacagcaccccctgggggtattttgactttaacagattccactgccacttctcaccacgtgactggcagcgactcatcaacaacaactggggattccggcccaagaagctgcggttcaagctcttcaacatccaggtcaaggaggtcacaacgaatgacggcgtcacgaccatcgctaataaccttaccagcacggttcaggtcttctcggactcggaataccagctgccgtacgtcctcggctctgcgcaccagggctgcctgcctccgttcccggcggacgtcttcatgattcctcagtacggctacctgactctgaacaacggcagccaatcggtgggccgttcctccttctactgcctggaatatttcccctctcaaatgctgagaacgggcaacaactttgagttcagttacagcttcgaggacgtgcctttccacagcagctacgcgcacagccagagcctagaccggctgatgaaccctctcatcgaccagtacctgtactacctggcccggacccagagcaccacgggttccaccagggaactgcaatttcatcaagctgggcccaatactatggccgagcagtcaaagaactggctgcctggaccctgctataggcaacagggactgtcaaagaacttggactttaacaacaacagcaattttgcctggactgctgccactaaatatcatctgaatggcagaaactctttgaccaatcctggcattcccatggcaaccaacaaggatgatgaggaccagttctttcccatcaacggggtactggtttttggcaagacgggagctgccaacaaaactacgctggaaaacgttctgatgaccagcgaggaggagatcaagaccactaaccctgtggctacagaagaatacggtgtggtctccagcaacctgcagccgtctacagccgggcctcaatcacagactatcaacagccagggagcactgcctggcatggtctggcagaaccgggacgtgtatctgcagggtcccatctgggccaaaattcctcacacggatggcaactttcacccgtctcctctgatgggcggttttggactcaaacacccgcctccacagatcctgatcaaaaacacacctgtacctgctaatcctccggaggtgtttactcctgccaagtttgcctccttcatcacgcagtacagcaccggacaagtcagcgtggaaatcgagtgggagctgcagaaagaaaacagcaagcgctggaacccagaaattcagtatacttccaattatgccaagtctaataatgttgaatttgctgtgaaccctgatggtgtttatactgagcctcgccccattggcactcgttacctcccccgtaatctgtaattgcttgttaatcaataaaccggttgattcgtttcagttgaactttggtctctgcgaagggcgaattc

SEQ ID NO: 438 - protein, 1458 aa, Artificial Sequence
  source: /note="Description of Artificial Sequence: Synthetic polypeptide"
MAADGYLPDWLEDNLSEGIREWWDLKPGAPKPKANQQKQDDGRGLVLPGYKYLGPFNGLDKGEPVNAADAAALEHDKAYDQQLKAGDNPYLRYNHADAEFQERLQEDTSFGGNLGRAVFQAKKRVLEPLGLVEEGAKTAPGKKRPIDSPDSSTGIGKKGQQPAKKKLNFGQTGDSESVPDPQPLGEPPAAPSSVGSGTMAAGGGAPTADNNEGADGVGNASGNWHCDSTWLGDRVITTSTRTWALPTYNNHLYKQISSSSSGATNDNHYFGYSTPWGYFDFNRFHCHFSPRDWQRLINNNWGFRPKKLRFKLFNIQVKEVTTNDGVTTIANNLTSTVQVFSDSEYQLPYVLGSAHQGCLPPFPADVFMIPQYGYLTLNNGSQSVGRSSFYCLEYFPSQMLRTGNNFEFSYSFEDVPFHSSYAHSQSLDRLMNPLIDQYLYYLARTQSTTGSTRELQFHQAGPNTMAEQSKNWLPGPCYRQQRLSKNLDFNNNSNFAWTAATKYHLNGRNSLTNPGIPMATNKDDEDQFFPINGVLVFGKTGAANKTTLENVLMTSEEEIKTTNPVATEEYGVVSSNLQSSTAGPQSQTINSQGALPGMVWQNRDVYLQGPIWAKIPHTDGNFHPSPLMGGFGLEHPPPQILIKNTPVPANPPEVFTPAKFASFITQYSTGQVSVEIEWELQKENSKRWNPEIQYTSNYAKSNNVEFAVNPDGVYTEPRPIGTRYLTRNLMAADGYLPDWLEDNLSEGIREWWDLKPGAPKPKANQQKQDDGRGLVLPGYKYLGPFNGLDKGEPVNAADAAALEHDKAYDQQLKAGDNPYLRYNHADAEFQERLQEDTSFGGNLGRAVFQAKKRVLEPLGLVEEGAKTAPGKKRPIGSPDSSTGIGKKGQQPAKKKLNFGQTGDSESVPDPQPLGEPPAAPSSVGSGTMAAGGGAPMADNNEGADGVGNASGNWHCDSTWLGDRVITTSTRTWALPTYNNHLYKQISSSSSGATNDNHYFGYSTPWGYFDFNRFHCHFSPRDWQRLINNNWGFRPKKLRFKLLNIQVKEVTTNDGVTTIANNLTSTVQVFSDSEYQLPYVLGSAHQGCLPPFPADVFMIPQYGYLTLDNGSQSVGRSSFYCLEYFPSQMLRTGNNFEFSYSFEDVPFHSSYAHSQSLDRLMNPLIDQYLYYLARTQSTTGSTRELQFHQAGPNTMAEQSKNWLPGPCYRQQRLSKNLDFNNNSNFAWTAATKYHLNGRNSLTNPGIPMATNKDDEDQFFPINGVLVFGKTGAANKTTLENVLMTSEEEIKTTNPVATEEYGVVSSNLQSSTAGPQSQTINSQGALPGMVWQNRDVYLQGPIWAKIPHTDGNFHPSPLMGGFGLKHPPPQILIKNTPVPANPPEVFTPAKFASFITQYSTGQVSVEIEWELQKENSKRWNPEIQYTSNYAKSNNVEFAVNPDGVYTEPRPIGTRYLTRNL

SEQ ID NO: 439 - DNA, 3095 bp, Artificial Sequence
  source: /note="Description of Artificial Sequence: Synthetic polynucleotide"
gaattcgcccttcgcagagaccaaagttcaactgaaacgaatcaaccggtttattgattaacaagcaattacagattacgggtgaggtaacgagtgccaatggggcgaggctcagtataaacaccatcagggttcacagcaaattcaacattattagacttggcataattggaagtatactgaatttctgggttccagcgcttgctgttttctttctgcagctcccactcgatttccacgctgacttgtccggtgctgtactgcgtgatgaaggaggcaaacttggcaggagtaaacacctccggaggattagcaggtacaggtgtgtttttgatcaggatctgtggaggcgggtgtttgagtccaaaaccgcccatcagaggagacgggtgaaagttgccatccgtgtgaggaattttggcccagatgggaccctgcagatacacgtcccggttctgccagaccatgccaggcagtgctccctggctgttgatagtctgtgattgaggcccggctgtagacgactgcaggttgctggagaccacaccgtattcttctgtagccacagggttagtggtcttgatctcctcctcgctggtcatcagaacgttttccagcgtagttttgttggcagctcccgtcttgccaaaaaccagtaccccgttgatgggaaagaactggtcctcatcatccttgttggttgccatgggaatgccaggattggtcaaagagtttctgccattcagatgatatttagtggcagcagtccaggcaaaattgctgttgttgttaaagtccaagttctttgacagtctctgttgcctatagcagggtccaggcagccagttctttgactgctcggccatagtattgggcccagcttgatgaaattgcagttccctggtggaacccgtggtgctctgggtccgggccaggtagtacaggtactggtcgatgagagggttcatcagccggtctaggctctggctgtgcgcgtagctgctgtggaaaggcacgtcctcgaagctgtaactgaactcaaagttgttgcccgttctcagcatttgagaggggaaatattccaggcagtagaaggaggaacggcccaccgattggctgccgttgtccagagtcaggtagccgtactgaggaatcatgaagacgtccgccgggaacggaggcaggcagccctggtgcgcagagccgaggacgtacggcagctggtattccgagtccgagaagacctgaaccgtgctggtaaggttattagcgatggtcgtgacgccgtcattcgttgtgacctccttgacctggatgttgaggagcttgaaccgcagcttcttgggccggaatccccagttgttgttgatgagtcgctgccagtcacgtggtgagaagtggcagtggaatctgttaaagtcaaaatacccccagggggtgctgtagccgaagtagtggttgtcattggtggctcctgagctgctgctggagatttgcttgtagaggtggttgttgtaggtggggagggcccaggttctggtgctggtggtgatgactctgtcgcccagccatgtggaatcgcaatgccaatttcctgaggcattacccactccgtcggcaccttcgttattgtctgccattggtgcgccaccgcctgcagccattgtaccagatcccacactagagggcgctgctggaggttctccaagaggttgagggtcggggactgactctgagtcgccagtctgaccaaaattgagcttctttttagcgggctgctggccttttttgccgatgcccgtggaggagtctggagagcctatgggtctcttctttccaggagccgtcttagcgccttcctcaaccagaccgagaggttcgagaacccgcttcttggcctggaagactgctcgcccgaggttgcccccaaatgacgtatcttcttgcagacgctcctgaaactcggcgtcggcgtggttataccgcaggtacggattgtcacccgctttgagctgctggtcgtaggccttgtcgtgctcgagggccgctgcgtccgccgcgttgacgggctcccccttgtcgagtccgttgaagggtccgaggtacttgtagccaggaagcaccagaccccggccgtcgtcctgcttttgctggttggctttgggtttcggggctccaggtttcaggtcccaccactcgcgaatgccctcagagaggttgtcctcgagccaatctggaagataaccatcggcagccatacctggtttaagtcatttattgctcagaaacacagtcgtccaggtccacgttgaccaggtcgcaggccgagcaagcaatctcgggtgcccgccccagcagatgatgaatcgcacacagcttccgatacgtcttttttctgacgaccggttgagattctgacacgccggggaaacattctaaacagtctctgaccccgtgcgtgaagcaaatgttgaaattctgattcattctctcgcacgttttgcagggaaacagcacctgaagcatgcccgcgtgacgagaacatttgttttggtacctgtcggcaaagtccaccggagctccttccgcgtctgacgtcgatgggtccgtgactgagggacgggcccgcttgggctcgcttatatccgcgtcatcgggggcgggtcttttgctggctccgccctttctgacgtagaactcatgcgtcacctcagtcacgtgatcactagcccagcggaagaactctttgacttcctgctttgtcaccttgccaaagtcgtgttccagacggcgggtgagttcaaatttgaacatccggtcctgcaacggttgctggtgctcgaaggtggtgctgttcccgtcgatcacggcgcacatgttggtgttggaggtgacgatcacgggggtgggatcgatctgggcggacgacttgcacttttggtccacgcgcaccttgctgccgccgagaatggccttggcggactccacgaccttggccgtcatcttgccctcctcccaccagatcaccatcttgtcgacgcaatcgttgaagggaaagttctcattggtccagttgacgcagcaagggcgaattc

SEQ ID NO: 440 - DNA, 3095 bp, Artificial Sequence
  source: /note="Description of Artificial Sequence: Synthetic polynucleotide"
gaattcgcccttcgcagagaccaaagttcaactgaaacgaatcaaccggtttattgattaacaagcaattacagattacgggtgaggtaacgagtgccaatggggcgaggctcagtataaacaccatcagggttcacagcaaattcaacattattagacttggcataattggaagtatactgaatttctgggttccagcgcttgctgttttctttctgcagctcccactcgatttccacgctgacttgtccggtgctgtactgcgtgatgaaggaggcaaacttggcaggagtaaacacctccggaggattagcaggtacaggtgtgtttttgatcaggatctgtggaggcgggtgttcgagtccaaaaccgcccatcagaggagacgggtgaaagttgccatccgtgtgaggaattttggcccagatgggaccctgcagatacacgtcccggttctgccagaccatgccaggcagtgctccctggctgttgatagtctgtgattgaggcccggctgtagacgactgcaggttgctggagaccacaccgtattcttctgtagccacagggttagtggtcttgatctcctcctcgctggtcatcagaacgttttccagcgtagttttgttggcagctcccgtcttgccaaaaaccagtaccccgttgatgggaaagaactggtcctcatcatccttgttggttgccatgggaatgccaggattggtcaaagagtttctgccattcagatgatatttagtggcagcagtccaggcaaaattgctgttgttgttaaagtccaagttctttgacagtctctgttgcctatagcagggtccaggcagccagttctttgactgctcggccatagtattgggcccagcttgatgaaattgcagttccctggtggaacccgtggtgctctgggtccgggccaggtagtacaggtactggtcgatgagagggttcatcagccggtctaggctctggctgtgcgcgtagctgctgtggaaaggcacgtcctcgaagctgtaactgaactcaaagttgttgcccgttctcagcatttgagaggggaaatattccaggcagtagaaggaggaacggcccaccgattggctgccgttgttcagagtcaggtagccgtactgaggaatcatgaagacgtccgccgggaacggaggcaggcagccctggtgcgcagagccgaggacgtacggcagctggtattccgagtccgagaagacctgaaccgtgctggtaaggttattagcgatggtcgtgacgccgtcattcgttgtgacctccttgacctggatgttgaagagcttgaaccgcagcttcttgggccggaatccccagttgttgttgatgagtcgctgccagtcacgtggtgagaagtggcagtggaatctgttaaagtcaaaatacccccagggggtgctgtagccgaagtagtggttgtcattggtggctcctgagctgctgctggagatttgcttgtagaggtggttgttgtaggtggggagggcccaggttctggtgctggtggtgatgactctgtcgcccagccatgtggaatcgcaatgccaatttcctgaggcattacccactccgtcggcaccttcgttattgtctgccgttggtgcgccaccgcctgcagccattgtaccagatcccacactagagggcgctgctggaggttctccaagaggttgagggtcggggactgactctgagtcgccagtctgaccaaaattgagcttctttttagcgggctgctggccttttttgccgatgcccgtggaggagtctggagagtctatgggtctcttctttccaggagccgtcttagcgccttcctcaaccagaccgagaggttcgagaacccgcttcttggcctggaagactgctcgcccgaggttgcccccaaatgacgtatcttcttgcaggcgctcctgaaactcggcgtcggcgtggttataccgcaggtacggattgtcacccgctttgagctgctggtcgtaggccttgtcgtgctcgagggccgctgcgtccgccgcgttgacgggctcccccttgtcgagtccgttgaagggtccgaggtacttgtagccaggaagcaccagaccccggccgtcgtcctgcttttgctggttggctttgggtttcggggctccaggtttcaggtcccaccactcgcgaatgccctcagagaggttgtcctcgagccaatctggaagataaccatcggcagccatacctggtttaagccatttattgctcagaaacacagtcgtccaggtccacgttgaccaggtcgcaggccgagcaggcaatctcgggtgcccgccccagcagatgatgaatcgcacacagcttccgatacgtcttttttctgacgaccggttgagattctgacacgccggggaaacattctaaacagtctctgaccccgtgcgtgaagcaaatgttgaaattctgattcattctctcgcacgttttgcagggaaacagcatctgaagcatgcccgcgtggcgagaacatttgttttggtacctgtcggcaaagtccaccggagctccttccgcgtctgacgtcgatgggtccgtgactgagggacaggcccgcttgggctcgcttatatccgcgtcatcgggggcgggtcttttgctggctccgccctttctgacgtagaactcatgcgtcacctcagtcacgtgatcactagcccagcggaagaactctttgacttcctgctttgtcaccttgccaaagtcgtgttccagacggcgggtgagttcaaatttgaacatccggtcctgcaacggctgctggtgctcgaaggtggtgctgttcccgtcgatcacggcgcgcatgttggtgttggaggtgacgatcacgggggtgggatcgatctgggcggacgacttgcacttttggtccacgcgcaccttgctgccgccgagaatggccttggcggactccacgaccttggccgtcatcttgccctcctcccaccagatcaccatcttgtcgacgcaatcgttgaagggaaagttctcattggtccagttgacgcagcaagggcgaattc

SEQ ID NO: 441 - protein, 729 aa, Artificial Sequence; identical to SEQ ID NO: 169
  source: /note="Description of Artificial Sequence: Synthetic polypeptide"

SEQ ID NO: 442 - protein, 729 aa, Artificial Sequence
  source: /note="Description of Artificial Sequence: Synthetic polypeptide"
MAADGYLPDWLEDNLSEGIREWWDLKPGAPKPKANQQKQDDGRGLVLPGYKYLGPFNGLDKGEPVNAADAAALEHDKAYDQQLKAGDNPYLRYNHADAEFQERLQEDTSFGGNLGRAVFQAKKRVLEPLGLVEEGAKTAPGKKRPIDSPDSSTGIGKKGQQPAKKKLNFGQTGDSESVPDPQPLGEPPAAPSSVGSGTMAAGGGAPTADNNEGADGVGNASGNWHCDSTWLGDRVITTSTRTWALPTYNNHLYKQISSSSSGATNDNHYFGYSTPWGYFDFNRFHCHFSPRDWQRLINNNWGFRPKKLRFKLFNIQVKEVTTNDGVTTIANNLTSTVQVFSDSEYQLPYVLGSAHQGCLPPFPADVFMIPQYGYLTLNNGSQSVGRSSFYCLEYFPSQMLRTGNNFEFSYSFEDVPFHSSYAHSQSLDRLMNPLIDQYLYYLARTQSTTGSTRELQFHQAGPNTMAEQSKNWLPGPCYRQQRLSKNLDFNNNSNFAWTAATKYHLNGRNSLTNPGIPMATNKDDEDQFFPINGVLVFGKTGAANKTTLENVLMTSEEEIKTTNPVATEEYGVVSSNLQSSTAGPQSQTINSQGALPGMVWQNRDVYLQGPIWAKIPHTDGNFHPSPLMGGFGLKHPPPQILIKNTPVPANPPEVFTPAKFASFITQYSTGQVSVEIEWELQKENSKRWNPEIQYTSNYAKSNNVEFAVNPDGVYTEPRPIGTRYLTRNL

SEQ ID NO: 443 - protein, 729 aa, Artificial Sequence
  source: /note="Description of Artificial Sequence: Synthetic polypeptide"
MAADGYLPDWLEDNLSEGIREWWDLKPGAPKPKANQQKQDDGRGLVLPGYKYLGPFNGLDKGEPVNAADAAALEHDKAYDQQLKAGDNPYLRYNHADAEFQERLQEDTSFGGNLGRAVFQAKKRVLEPLGLVEEGAKTAPGKKRPIDSPDSSTGIGKKGQQPAKKKLNFGQTGDSESVPDPQPLGEPPAAPSSVGSGTMAAGGGAPMADNNEGADGVGNASGNWHCDSTWLGDRVITTSTRTWALPTYNNHLYKQISSSSSGATNDNHYFGYSTPWGYFDFNRFHCHFSPRDWQRLINNNWGFRPKKLRFKLFNIQVKEVTTNDGVTTIANNLTSTVQVFSDSEYQLPYVLGSAHQGCLPPFPADVFMIPQYGYLTLNNGSQSVGRSSFYCLEYFPSQMLRTGNNFEFSYSFEDVPFHSSYAHSQSLDRLMNPLIDQYLYYLARTQSTTGSTRELQFHQAGPNTMAEQSKNWLPGPCYRQQRLSKNLDFNNNSNFAWTAATKYHLNGRNSLTNPGIPMATNKDDEDQFFPINGVLVFGKTGAANKTTLENVLMTSEEEIKTTNPVATEEYGVVSSNLQSSTAGPQSQTINSQGALPGMVWQNRDVYLQGPIWAKIPHTDGNFHPSPLMGGFGLKHPPPQILIKNTPVPANPPEVFTPAKFASFITQYSTGQVSVEIEWELQKENSKRWNPEIQYTSNYAKSNNVEFAVNPDGVYTEPRPIGTRYLTRNL

SEQ ID NO: 444 - DNA, 2217 bp, Artificial Sequence
  source: /note="Description of Artificial Sequence: Synthetic polynucleotide"
atggctgctgacggttatcttccagattggctcgaggacaacctctctgagggcattcgcgagtggtgggacctgaaacctggagcccccaagcccaaggccaaccagcagaagcaggacgacggccggggtctggtgcttcctggctacaagtacctcggacccttcaacggactcgacaagggggagcccgtcaacgcggcggacgcagcggccctcgagcacgacaaggcctacgaccagcagctcaaagcgggtgacaatccgtacctgcggtataaccacgccgacgccgagtttcaggagcgtctacaagaagatacgtcttttgggggcaacctcgggcgagcagtcttccaggccaagaagcgggttctcgaacctctcggtctggttgaggaagctgctaagacggctcctggaaagaagagaccggtagaaccgtcacctcagcgttcccccgactcctccacgggcatcggcaagaaaggccagcggcccgctaaaaagagactgaactttggtcagactggcgactcagagtcagtccccgaccctcaaccaatcggagaaccaccagcaggcccctctggtctgggatctggtacaatggctgcaggcggtggcgctccaatggcagacaataacgaaggcgccgacggagtgggtagttcctcaggaaattggcattgcgattccacatggctgggcgacagagtcatcaccaccagcacccgaacctgggccctgcccacctacaacaaccacctctacaagcaaatatccaatgggacatcgggaggaagcaccaacgacaacacctacttcggctacagcaccccctgggggtattttgacttcaacagattccactgccacttctcaccacgtgactggcagcgactcatcaacaacaactggggattccggccaaaaagactcagcttcaagcccttcaacatccaggtcaaggaggtcacgcagaatgaaggcaccaagaccatcgccaataaccttaccagcacgattcaggtatttacggactcggaataccagctgccgtacgtcctcggctccgcgcaccagggctgcctgcctccgttcccggcggacgtcttcatgattccccagtacggctaccttacactgaacaatggaagtcaagccgtaggccgttcctccttctactgcctggaatattttccatctcaaatgctgcgaactggaaacaattttgaattcagctacaccttcgaggacgtgcctttccacagcagctacgcacacagccagagcttggaccgactgatgaatcctctcatcgaccagtacctgcactacttatccagaactcagtccacaggaggaactcaaggtacccagcaattgttattttctcaagctgggcctgcaaacatgtcggctcaggctaagaactggctacctggaccttgctaccggcagcagcgagtctctacgacactgtcgcaaaacaacaacagcaactttgcttggactggtgccaccaaatatcacctgaacggaagagactctttggtaaatcccggtgtcgccatggcaacccacaaggacgacgaggaacgcttcttcccgtcgagtggagtcctgatgtttggaaaacagggtgctggaagagacaatgtggactacagcagcgttatgctaaccagcgaagaagaaattaaaaccactaaccctgtagccacagaacaatacggtgtggtggctgacaacttgcagcaaaccaatacagggcctattgtgggaaatgtcaacagccaaggagccttacctggcatggtctggcagaaccgagacgtgtacctgcagggtcccatctgggccaagattcctcacacggacggcaacttccacccttcaccgctaatgggaggatttggactgaagcacccacctcctcagatcctgatcaagaacacgccggtacctgcggatcctccaacaacgttcagccaggcgaaattggcttccttcattacgcagtacagcaccggacaggtcagcgtggaaatcgagtgggagctgcagaaggagaacagcaaacgctggaacccagagattcagtacacttcaaactactacaaatctacaaatgtggactttgctgtcaatacagagggaacttattctgagcctcgccccattggtactcgctacctcacccgtaatctgtaa

SEQ ID NO: 445 - protein, 738 aa, Artificial Sequence
  source: /note="Description of Artificial Sequence: Synthetic polypeptide"
MAADGYLPDWLEDNLSEGIREWWDLKPGAPKPKANQQKQDDGRGLVLPGYKYLGPFNGLDKGEPVNAADAAALEHDKAYDQQLKAGDNPYLRYNHADAEFQERLQEDTSFGGNLGRAVFQAKKRVLEPLGLVEEAAKTAPGKKRPVEPSPQRSPDSSTGIGKKGQRPAKKRLNFGQTGDSESVPDPQPIGEPPAGPSGLGSGTMAAGGGAPMADNNEGADGVGSSSGNWHCDSTWLGDRVITTSTRTWALPTYNNHLYKQISNGTSGGSTNDNTYFGYSTPWGYFDFNRFHCHFSPRDWQRLINNNWGFRPKRLSFKPFNIQVKEVTQNEGTKTIANNLTSTIQVFTDSEYQLPYVLGSAHQGCLPPFPADVFMIPQYGYLTLNNGSQAVGRSSFYCLEYFPSQMLRTGNNFEFSYTFEDVPFHSSYAHSQSLDRLMNPLIDQYLHYLSRTQSTGGTQGTQQLLFSQAGPANMSAQAKNWLPGPCYRQQRVSTTLSQNNNSNFAWTGATKYHLNGRDSLVNPGVAMATHKDDEERFFPSSGVLMFGKQGAGRDNVDYSSVMLTSEEEIKTTNPVATEQYGVVADNLQQTNTGPIVGNVNSQGALPGMVWQNRDVYLQGPIWAKIPHTDGNFHPSPLMGGFGLKHPPPQILIKNTPVPADPPTTFSQAKLASFITQYSTGQVSVEIEWELQKENSKRWNPEIQYTSNYYKSTNVDFAVNTEGTYSEPRPIGTRYLTRNL

SEQ ID NO: 446 - DNA, 2217 bp, Artificial Sequence
  source: /note="Description of Artificial Sequence: Synthetic polynucleotide"
atggctgctgacggttatcttccagattggctcgaggacaacctctctgagggcattcgcgagtggtgggacctgaaacctggagcccccaagcccaaggccaaccagcagaagcaggacgacggccggggtctggtgcttcctggctacaagtacctcggacccttcaacggactcgacaagggggagcccgtcaacgcggcggacgcagcggccctcgagcacgacaaggcctacgaccagcagctcaaagcgggtgacaatccgtacctgcggtataaccacgccgacgccgagtttcaggagcgtctgcaagaagatacgtcttttgggggcaacctcgggcgagcagtcttccaggccaagaagcgggttctcgaacctctcggtctggttgaggaagctgctaagacggctcctggaaagaagagaccggtagaaccgtcacctcagcgttcccccgactcctccacgggcatcggcaagaaaggccagcagcccgctaaaaagagactgaactttggtcagactggcgactcagagtcagtccccgaccctcaaccaatcggagaaccaccagcaggcccctctggtctgggatctggtacaatggctgcaggcggtggcgctccaatggcagacaataacgaaggcgccgacggagtgggtagttcctcaggaaattggcattgcgattccacatggctgggcgacagagtcatcaccaccagcacccgaacctgggccctgcccacctacaacaaccacctctacaagcaaatatccaatgggacatcgggaggaagcaccaacgacaacacctacttcggctacagcaccccctgggggtattttgacttcaacagattccactgccacttctcaccacgtgactggcagcgactcatcaacaacaactggggattccggccaaaaagactcagcttcaagctcttcaacatccaggtcaaggaggtcacgcagaatgaaggcaccaagaccatcgccaataaccttaccagcacgattcaggtatttacggactcggaataccagctgccgtacgtcctcggctccgcgcaccagggctgcctgcctccgttcccggcggacgtcttcatgattccccagtacggctaccttacactgaacaatggaagtcaagccgtaggccgttcctccttctactgcctggaatattttccatctcaaatgctgcgaactggaaacaattttgaattcagctacaccttcgaggacgtgcctttccacagcagctacgcacacagccagagcttggaccgactgatgaatcctctcatcgaccagtacctgtactacttatccagaactcagtccacaggaggaactcaaggtacccagcaattgttattttctcaagctgggcctgcaaacatgtcggctcaggctaagaactggctacctggaccttgctaccggcagcagcgagtctctacgacactgtcgcaaaacaacaacagcaactttgcttggactggtgccaccaaatatcacctgaacggaagagactctttggtaaatcccggtgtcgccatggcaacccacaaggacgacgaggaacgcttcttcccgtcgagtggagtcctgatgtttggaaaacagggtgctggaagagacaatgtggactacagcagcgttatgctaaccagcgaagaagaaattaaaaccactaaccctgtagccacagaacaatacggtgtggtggctgataacttgcagcaaaccaatacggggcctattgtgggaaatgtcaacagccaaggagccttacctggcatggtctggcagaaccgagacgtgtacctgcagggtcccatctgggccaagattcctcacacggacggcaacttccacccttcaccgctaatgggaggatttggactgaagcacccacctcctcagatcctgatcaagaacacgccggtacctgcggatcctccaacaacgttcagccaggcgaaattggcttccttcattacgcagtacagcaccggacaggtcagcgtggaaatcgagtgggagctgcagaaggagaacagcaaacgctggaacccagagattcagtacacttcaaactactacaaatctacaaatgtggactttgctgtcaatacagagggaacttattctgagcctcgccccattggtactcgttacctcacccgtaatctgtaa

SEQ ID NO: 447 - protein, 738 aa, Artificial Sequence; identical to SEQ ID NO: 99
  source: /note="Description of Artificial Sequence: Synthetic polypeptide"

SEQ ID NO: 448 - protein, 738 aa, Artificial Sequence
  source: /note="Description of Artificial Sequence: Synthetic polypeptide"
MAADGYLPDWLEDNLSEGIREWWDLKPGAPKPKANQQKQDDGRGLVLPGYKYLGPFNGLDKGEPVNAADAAALEHDKAYDQQLKAGDNPYLRYNHADAEFQERLQEDTSFGGNLGRAVFQAKKRVLEPLGLVEEAAKTAPGKKRPVEPSPQRSPDSSTGIGKKGQQPAKKRLNFGQTGDSESVPDPQPIGEPPAGPSGLGSGTMAAGGGAPMADNNEGADGVGSSSGNWHCDSTWLGDRVITTSTRTWALPTYNNHLYKQISNGTSGGSTNDNTYFGYSTPWGYFDFNRFHCHFSPRDWQRLINNNWGFRPKRLSFKLFNIQVKEVTQDEGTKTIANNLTSTIQVFTDSEYQLPYVLGSAHQGCLPPFPADVFMIPQYGYLTLNNGSQAVGRSSFYCLEYFPSQMLRTGNNFEFSYTFEDVPFHSSYAHSQSLDRLMNPLIDQYLYYLSRTQSTGGTQGTQQLLFSQAGPANMSARAKNWLPGPCYRQQRVSTTLSQNNNSNFAWTGATKYHLNGRDSLVNPGVAMATHKDDEERFFPSSGVLMFGKQGAGRDNVDYSSVMLTSEEEIKTTNPVATEQYGVVADNLQQANTGPIVGNVNSQGALPGMVWQNRDVYLQGPIWAKIPHTDGNFHPSPLMGGFGLKHPPPQILIKNTPVPADPPTTFSQAKLASFITQYSTGQVSVEIEWELQKENSKRWNPEIQYTSNYYKSTNVDFAVNSEGTYSEPRPIGTRYLTRNL

SEQ ID NO: 449 - DNA, 2217 bp, Artificial Sequence
  source: /note="Description of Artificial Sequence: Synthetic polynucleotide"
atggctgctgacggttatcttccagattggctcgaggacaacctctctgagggcattcgcgagtggtgggacctgaaacctggagcccccaagcccaaggccaaccagcagaagcaggacgacggccggggtctggtgcttcctggctacaagtacctcggacccttcaacggactcgacaagggggagcccgtcaacgcggcggacgcagcggccctcgagcacgacaaggcctacgaccagcagctcaaagcgggtgacaatccgtacctgcggtataaccacgccgacgccgagtttcaggagcgtctgcaagaagatacgtcttttgggggcaacctcgggcgagcagtcttccaggccaagaagcgggttctcgaacctctcggtctggttgaggaagctgctaagacggctcctggaaagaagagaccggtagaaccgtcacctcagcgttcccccgactcctccacgggcatcggcaagaaaggccagcagcccgctaaaaagagactgaactttggtcagactggcgactcagagtcagtccccgaccctcaaccaatcggagaaccaccagcaggcccctctggtctgggatctggtacaatggctgcaggcggtggcgctccaatggcagacaataacgaaggcgccgacggagtgggtagttcctcaggaaattggcattgcgattccacatggctgggcgacagagtcatcaccaccagcacccgaacctgggccctgcccacctacaacaaccacctctacaagcaaatatccaatgggacatcgggaggaagcaccaacgacaacacctacttcggctacagcaccccctgggggtattttgacttcaacagattccactgccacttctcaccacgtgactggcagcgactcatcaacaacaactggggattccggccaaaaagactcagcttcaagctcttcaacatccaggtcaaggaggtcacgcaggatgaaggcaccaagaccatcgccaataaccttaccagcacgattcaggtatttacggactcggaataccagctgccgtacgtcctcggctccgcgcaccagggctgcctgcctccgttcccggcggacgtcttcatgattccccagtacggctaccttacactgaacaatggaagtcaagccgtaggccgttcctccttctactgcctggaatattttccatctcaaatgctgcgaactggaaacaattttgaattcagctacaccttcgaggacgtgcctttccacagcagctacgcacacagccagagcttggaccgactgatgaatcctctcatcgaccagtacctgtactacttatccagaactcagtccacaggaggaactcaaggtacccagcaattgttattttctcaagctgggcctgcaaacatgtcggctcgggctaagaactggctacctggaccttgctaccggcagcagcgagtctctacgacactgtcgcaaaacaacaacagcaactttgcttggactggtgccaccaaatatcacctgaacggaagagactctttggtaaatcccggtgttgctatggcaacgcataaggacgacgaggaacgtttctttccatcgagcggagtcctgatgtttggaaaacagggtgctggaagagacaatgtggactatagcagcgttatgctaaccagcgaggaagaaattaaaaccactaaccctgtagccacagaacaatacggtgtggtggctgacaacttgcagcaagccaatacagggcctattgtgggaaatgtcaacagccaaggagccttacctggcatggtctggcagaaccgagacgtgtacctgcagggtcccatctgggccaaaattcctcacacggacggcaattttcacccgtctcctctgatgggcggctttggactgaagcacccacctccccagatcctgatcaagaatacgccggtacctgcggatcctccaacgacgttcagccaggcaaaattggcttccttcatcacgcagtacagcaccggccaggtcagcgtggagatcgagtgggagctgcagaaggagaacagcaagcgatggaacccagaaattcagtacacttccaactactacaaatctacaaatgtggactttgctgtcaattctgagggtacatattcagagcctcgccccattggtactcgttatctgacacgtaatctgtaa

SEQ ID NO: 450 - DNA, 2211 bp, Artificial Sequence
  source: /note="Description of Artificial Sequence: Synthetic polynucleotide"
atggctgccgatggttatcttccagattggctcgaggacaacctctctgagggcattcgcgagtggtgggacttgaaacctggagccccgaaacccaaagccaaccagcaaaagcaggacgacggccggggcctggtgcttcctggctacaagtacctcggacccttcaacggactcgacaagggggagcccgtcaacgcggcggacgcagcggccctcgagcacgacaaggcctacgaccagcagctcgaagcgggtgacaatccgtacctgcggtataaccacgccgacgccgagtttcaggagcgtctgcaagaagatacgtcttttgggggcaacctcgggcgagcagtcttccaggccaagaagcgggttctcgaacctctcggtctggttgaggaaggcgctaagacggctcctggaaagaagagaccagtagagcagtcaccccaagaaccagactcctcctcgggcatcggcaagaaaggccaacagcccgccagaaaaagactcaattttggccagactggcgactcagagtcagttccagaccctcaacctctcggagaacctccagcagcgccctctggtgtgggacctaatacaatggctgcaggcggtggcgcaccaatggcagacaataacgaaggcgccgacggagtgggtagttcctcgggaaattggcattgcgattccacatggctgggcgacagagtcatcaccaccagcacccgaacctgggccctgcccacctacaacaaccacctctacaagcaaatctccaacgggacatcgggaggagccaccaacgacaacacctacttcggctacagcaccccctgggggtattttgactttaacagattccactgccacttttcaccacgtgactggcagcgactcatcaacaacaactggggattccggcccaagagactcagcttcaagctcttcaacatccaggtcaaggaggtcacgcagaatgaaggcaccaagaccatcgccaataacctcaccagcaccatccaggtgtttacggactcggagtaccagctgccgtacgttctcggctctgcccaccagggctgcctgcctccgttcccggcggacgtgttcatgattccccagtacggctacctaacactcaacaacggtagtcaggccgtgggacgctcctccttctactgcctggaatactttccttcgcagatgctgagaaccggcaacaacttccagtttacttacaccttcgaggacgtgcctttccacagcagctacgcccacagccagagcttggaccggctgatgaatcctctgattgaccagtacctgtactacttgtctcggactcaaacaacaggaggcacggcaaatacgcagactctgggcttcagccaaggtgggcctaatacaatggccaatcaggcaaagaactggctgccaggaccctgttaccgccaacaacgcgtctcaacgacaaccgggcaaaacaacaatagcaactttgcctggactgctgggaccaaataccatctgaatggaagaaattcattggctaatcctggcatcgctatggcaacacacaaagacgacgaggagcgttttttcccagtaacgggatcctgtttttggcaacaaaatgctgccagagacaatgcggattacagcgatgtcatgctcaccagcgaggaagaaatcaaaaccactaaccctgtggctacagaggaatacggtatcgtggcagataacttgcagcagcaaaacacggctcctcaaattggaactgtcaacagccagggggccttacccggtatggtctggcagaaccgggacgtgtacctgcagggtcccatctgggccaagattcctcacacggacggcaacttccacccgtctccgctgatgggcggctttggcctgaaacatcctccgcctcagatcctgatcaagaacacgcctgtacctgcggatcctccgaccaccttcaaccagtcaaagctgaactctttcatcacgcaatacagcaccggacaggtcagcgtggaaattgaatgggagctacagaaggaaaacagcaagcgctggaaccccgagatccagtacacctccaactactacaaatctacaagtgtggactttgctgttaatacagaaggcgtgtactctgaaccccgccccattggcacccgttacctcacccgtaatctgtaa

SEQ ID NO: 451 - protein, 736 aa, Artificial Sequence
  source: /note="Description of Artificial Sequence: Synthetic polypeptide"
MAADGYLPDWLEDNLSEGIREWWDLKPGAPKPKANQQKQDDGRGLVLPGYKYLGPFNGLDKGEPVNAADAAALEHDKAYDQQLEAGDNPYLRYNHADAEFQERLQEDTSFGGNLGRAVFQAKKRVLEPLGLVEEGAKTAPGKKRPVEQSPQEPDSSSGIGKKGQQPARKRLNFGQTGDSESVPDPQPLGEPPAAPSGVGPNTMAAGGGAPMADNNEGADGVGSSSGNWHCDSTWLGDRVITTSTRTWALPTYNNHLYKQISNGTSGGATNDNTYFGYSTPWGYFDFNRFHCHFSPRDWQRLINNNWGFRPKRLSFKLFNIQVKEVTQNEGTKTIANNLTSTIQVFTDSEYQLPYVLGSAHQGCLPPFPADVFMIPQYGYLTLNNGSQAVGRSSFYCLEYFPSQMLRTGNNFQFTYTFEDVPFHSSYAHSQSLDRLMNPLIDQYLYYLSRTQTTGGTANTQTLGFSQGGPNTMANQAKNWLPGPCYRQQRVSTTTGQNNNSNFAWTAGTKYHLNGRNSLANPGIAMATHKDDEERFFPVTGSCFWQQNAARDNADYSDVMLTSEEEIKTTNPVATEEYGIVADNLQQQNTAPQIGTVNSQGALPGMVWQNRDVYLQGPIWAKIPHTDGNFHPSPLMGGFGLKHPPPQILIKNTPVPADPPTTFNQSKLNSFITQYSTGQVSVEIEWELQKENSKRWNPEIQYTSNYYKSTSVDFAVNTEGVYSEPRPIGTRYLTRNL

SEQ ID NO: 452 - DNA, 2214 bp, Artificial Sequence
  source: /note="Description of Artificial Sequence: Synthetic polynucleotide"
atggctgctgacggttatcttccagattggctcgaggacaacctctctgagggcattcgcgagtggtgggacctgaaacctggagcccccaagcccaaggccaaccagcagaagcaggacgacggccggggtctggtgcttcctggctacaagtacctcggacccttcaacggactcgacaagggggagcccgtcagcgcggcggacgcagcggccctcgagcacgacaaggcctgcgaccagcggctcaaagcgggtgacaatccgtacctgcggtataaccacgccgacgccgagtttcaggagcgtctgcaagaagatacgtcttttgggggcaacctcgggcgagcagtcttccaggccaagaagcgggttctcgaacctctcggtctggttgaggaagctgctaagacggctcctggaaagaagggaccggtagaaccgtcacctcagcgttcccccgactcctccacgggcatcggcaagaaaggccagcagcccgctagaaagagactgaactttgggcagactggcgactcagagtcagtccccgaccctcaaccaatcggagaaccaccagcaggcccctctggtctgggatctggtacaatggctgcaggcggtggcgcaccaatggctgacaataacgagggcgccgacggagtgggtaatgcctcaggaaattggcattgcgattccacatggctgggcgacagagtcatcaccaccagcacccgaacctgggctttgcccacctacaacaatcacctctacaagcaaatctccagtcagtcagcaggtagcaccaacgacaacgtctacttcggctacagcaccccctgggggtattttgacttcaacagattccactgtcacttctcaccacgtgactggcagcggctcatcaacaacaactggggattccggcccaagaagctcaacttcaagctgttcaacatccaggtcaaggaggtcacaacgaatgacggcgtcacgaccatcgccaataaccttaccagcacggttcaggtcttttcggactcggaataccagctgccctacgtcctcggctccgcacaccagggctgcctgcctccgttcccggcggacgtcttcatgattccccagtacggctacctgactctgaacaatggcagccaatcggtgggtcgttcctctttctactgcctggaatatttcccttctcaaatgctgagaacgggcaacaacttcaccttcagctacaccttcgaggacgttcccttccacagcagctacgcacacagccagagcctggaccggctgatgaatcctcttatcgaccagtacctgtattacctggccagaacacagagcaacgcaggaggcacagctggcaatcgggaactgcagttttatcagggcgggcctaccaccatggccgaacaagccaaaaactggctgcctggaccttgcttccggcaacaaagagtctccaagacgctggatcaaaacaacaacagcaactttgcttggactggtgccaccaaataccatctaaatggaagaaattcattggttaatcccggtgtcgccatggcaacccacaaggacgacgaggaacgcttcttcccttcgagcggagtcctgatttttggaaaaactggagcagctaataagactacactggaaaatgtgttaatgacaaatgaagaggaaattcgtcctaccaacccggtagccaccgaggaatacgggactgttagcagcaacctgcaggcggctaacactgcagcccagacacaagttgtcaacaaccagggagccttacctggtatggtctggcagaaccgggacgtgtacctgcagggtcccatctgggccaagattcctcacacggacggcaactttcacccgtctccgctgatgggcggctttggactgaagcatccgcctcctcagatcctgatcaaaaacactcctgttcctgctaatcccccggaggtgtttacgcctgccaagtttgcttctttcatcacacagtacagcaccggccaggtcagcgtggagatcgagtgggagctgcagaaggagaacagcaagcgctggaacccagagattcagtatacctccaattttgacgaacagactggtgtggactttgccgttgacagccagggtgtttattctgagcctcgccccattggtactcgttacctcacccgtaatctgtaa

SEQ ID NO: 453 - protein, 737 aa, Artificial Sequence
  source: /note="Description of Artificial Sequence: Synthetic polypeptide"
MAADGYLPDWLEDNLSEGIREWWDLKPGAPKPKANQQKQDDGRGLVLPGYKYLGPFNGLDKGEPVSAADAAALEHDKACDQRLKAGDNPYLRYNHADAEFQERLQEDTSFGGNLGRAVFQAKKRVLEPLGLVEEAAKTAPGKKGPVEPSPQRSPDSSTGIGKKGQQPARKRLNFGQTGDSESVPDPQPIGEPPAGPSGLGSGTMAAGGGAPMADNNEGADGVGNASGNWHCDSTWLGDRVITTSTRTWALPTYNNHLYKQISSQSAGSTNDNVYFGYSTPWGYFDFNRFHCHFSPRDWQRLINNNWGFRPKKLNFKLFNIQVKEVTTNDGVTTIANNLTSTVQVFSDSEYQLPYVLGSAHQGCLPPFPADVFMIPQYGYLTLNNGSQSVGRSSFYCLEYFPSQMLRTGNNFTFSYTFEDVPFHSSYAHSQSLDRLMNPLIDQYLYYLARTQSNAGGTAGNRELQFYQGGPTTMAEQAKNWLPGPCFRQQRVSKTLDQNNNSNFAWTGATKYHLNGRNSLVNPGVAMATHKDDEERFFPSSGVLIFGKTGAANKTTLENVLMTNEEEIRPTNPVATEEYGTVSSNLQAANTAAQTQVVNNQGALPGMVWQNRDVYLQGPIWAKIPHTDGNFHPSPLMGGFGLKHPPPQILIKNTPVPANPPEVFTPAKFASFITQYSTGQVSVEIEWELQKENSKRWNPEIQYTSNFDEQTGVDFAVDSQGVYSEPRPIGTRYLTRNL

SEQ ID NO: 454 - DNA, 2214 bp, Artificial Sequence
  source: /note="Description of Artificial Sequence: Synthetic polynucleotide"
atggctgccgatggttatcttccagattggctcgaggacaacctctctgagggcattcgcgagtggtgggacctgaaacctggagccccgaaacccaaagccaaccagcaaaagcaggacgacggccggggtctggtgcttcctggctacaagtacctcggacccttcaacggactcgacaagggggagcccgtcaacgcggcggacgcagcggccctcgagcacgacaaggcctacgaccagcagctcaaagcgggtgacaatccgtacctgcggtataaccacgccgacgccgagtttcaggagcgtctgcaagaagatacgtcttttgggggcaacctcgggcgagcagtcttccaggccaagaagcgggttctcgaacctctcggtctggttgaggaagctgctaagacggctcctggaaagaagagaccggtagaaccgtcacctcagcgttcccccgactcctccacgggcatcggcaagaaaggccagcagcccgctagaaagagactgaactttgggcagactggcgactcagagtcagtccccgaccctcaaccaatcggagaaccaccagcaggcccctctggtctgggatctggtacaatggctgcaggcggtggcgctccaatggcagacaataacgaaggcgccgacggagtgggtaatgcctcaggaaattggcattgcgattccacatggctgggcgacagagtcatcaccaccagcacccgaacctgggctttgcccacctacaacaaccacctctacaagcaaatctccagtcagtcagcaggtagcaccaacgacaacgtctacttcggctacagcaccccctgggggtattttgacttcaacagattccactgtcacttctcaccacgtgactggcagcggctcatcaacaacaactggggattccggcccaagaagctcaacttcaagctgttcaacatccaggtcaaggaggtcacaacgaatgacggcgtcacgaccatcgccaataaccttaccagcacggttcaggtcttttcggactcggaataccagctgccctacgtcctcggctccgcacaccagggctgcctgcctccgttcccggcggacgtcttcatgattcctcagtacggctacctgactctcaacaacggtagtcaggccgtgggacgttcctccttctactgcctggagtacttcccctctcagatgctgagaacgggcaacaacttttccttcagctacactttcgaggacgtgcctttccacagcagctacgcgcacagccagagtttggacaggctgatgaatcctctcatcgaccagtacctgtactacctgtcaagaacccagtctacgggaggcacagcgggaacccagcagttgctgttttctcaggccgggcctagcaacatgtcgactcaggccagaaactggctgcctggaccctgctacagacagcagcgcgtctccacgacactgtcgcaaaacaacaacagcaactttgcctggactggtgccaccaagtatcatctgaacggcagagactctctggtgaatccgggcgtcgccatggcaaccaacaaggacgacgaggaccgcttcttcccatccagcggcatcctcatgtttggcaagcagggagctggaaaagacaacgtggactatagcaacgtgatgctaaccagcgaggaagaaatcaagaccaccaaccccgtggccacagaacagtatggcgtggtggctgataacctacagcagcaaaacaccgctcctattgtgggggccgtcaacagccagggagccttacctggcatggtctggcagaaccgggacgtgtacctgcagggtcctatttgggccaagattcctcacacagatggcaactttcacccgtctcctttaatgggcggctttggacttaaacatccgcctcctcagatccttatcaaaaacactcctgttcctgcggatcctccaacagcgttcaaccaggccaagctgaattctttcatcacgcagtacagcaccggacaagtcagcgtggagatcgagtgggagctgcagaaggagaacagcaagcgctggaacccagagattcagtatacttccaactactacaaatctacaaatgtggactttgctgttaatactgagggtgcttactctgagcctcgccccattggcactcgttacctcacccgtaatctgtaa

SEQ ID NO: 455 - protein, 737 aa, Artificial Sequence
  source: /note="Description of Artificial Sequence: Synthetic polypeptide"
MAADGYLPDWLEDNLSEGIREWWDLKPGAPKPKANQQKQDDGRGLVLPGYKYLGPFNGLDKGEPVNAADAAALEHDKAYDQQLKAGDNPYLRYNHADAEFQERLQEDTSFGGNLGRAVFQAKKRVLEPLGLVEEAAKTAPGKKRPVEPSPQRSPDSSTGIGKKGQQPARKRLNFGQTGDSESVPDPQPIGEPPAGPSGLGSGTMAAGGGAPMADNNEGADGVGNASGNWHCDSTWLGDRVITTSTRTWALPTYNNHLYKQISSQSAGSTNDNVYFGYSTPWGYFDFNRFHCHFSPRDWQRLINNNWGFRPKKLNFKLFNIQVKEVTTNDGVTTIANNLTSTVQVFSDSEYQLPYVLGSAHQGCLPPFPADVFMIPQYGYLTLNNGSQAVGRSSFYCLEYFPSQMLRTGNNFSFSYTFEDVPFHSSYAHSQSLDRLMNPLIDQYLYYLSRTQSTGGTAGTQQLLFSQAGPSNMSTQARNWLPGPCYRQQRVSTTLSQNNNSNFAWTGATKYHLNGRDSLVNPGVAMATNKDDEDRFFPSSGILMFGKQGAGKDNVDYSNVMLTSEEEIKTTNPVATEQYGVVADNLQQQNTAPIVGAVNSQGALPGMVWQNRDVYLQGPIWAKIPHTDGNFHPSPLMGGFGLKHPPPQILIKNTPVPADPPTAFNQAKLNSFITQYSTGQVSVEIEWELQKENSKRWNPEIQYTSNYYKSTNVDFAVNTEGAYSEPRPIGTRYLTRNL

SEQ ID NO: 456 - DNA, 2217 bp, Artificial Sequence
  source: /note="Description of Artificial Sequence: Synthetic polynucleotide"
atggctgccgatggttatcttccagattggctcgaggacaacctctctgagggcattcgcgagtggtgggacctgaaacctggagccccgaaacccaaagccaaccagcaaaagcaggacgacggccggggtctggtgcttcctggctacaagtacctcggacccttcaacggactcgacaagggggagcccgtcaacgcggcggacgcagcggccctcgagcacgacaaggcctacgaccagcagctcaaagcgggtgacaatccgtacctgcggtataatcacgccgacgccgagtttcaggagcgtctgcaagaagatacgtcttttgggggcaacctcgggcgagcagtcttccaggccaagaagcgggttctcgaacctctcggtctggttgaggaaggcgctaagacggctcctggaaagaagagaccggtagagccgtcaccacagcgttcccccgactcctccacgggcatcggcaagaaaggccagcagcccgccagaaagagactcaatttcggtcagactggcgactcagagtcagtccccgaccctcaacctatcggagaacctccagcagcgccctctagtgtgggatctggtacaatggctgcaggcggtggcgcaccaatggcagacaataacgaaggtgccgacggagtgggtagttcctcgggaaattggcattgcgattccacatggctgggcgacagagtcatcaccaccagcacccgaacctgggccctgcccacctacaacaaccacctctacaagcaaatctccaacgggacctcgggaggcagcaccaacgacaacacctactttggctacagcaccccctgggggtattttgactttaacagattccactgccacttctcaccacgtgactggcagcgactcatcaacaacaactggggattccggcccaagagactcagcttcaagctcttcaacatccaggtcaaagaggtcacgcagaatgaaggcaccaagaccatcgccaataacctcaccagcaccatccaggtgtttacggactcggaataccagctgccgtacgtcctcggctctgcccaccagggctgcctgcctccgttcccggcggacgtcttcatgattcctcagtacggctacctgactctcaacaacggtagtcaggccgtgggacgttcctccttctactgcctggagtacttcccctctcagatgctgagaacgggcaacaacttttccttcagctacactttcgaggacgtgcctttccacagcagctacgcgcacagccagagtttggacaggctgatgaatcctctcatcgaccagtacctgtactacctgtcaagaacccagtctacgggaggcacagcgggaacccagcagttgctgttttctcaggccgggcctagcaacatgtcggctcaggccagaaactggctgcctggaccctgctacagacagcagcgcgtctccacgacactgtcgcaaaacaacaacagcaactttgcctggactggtgccaccaagtatcatctgaacggcagagactctctggtgaatccgggcgtcgccatggcaaccaacaaggacgacgaggaccgcttcttcccatccagcggcatcctcatgtttggcaagcagggagctggaaaagacaacgtggactatagcaacgtgatgctaaccagcgaggaagaaatcaaggccaccaaccccgtggccacagaacagtatggcgtggtggctgataacctacagcagcaaaacaccgctcctattgtgggggccgtcaacagccagggagccttacctggcatggtctggcagaaccgggacgtgtacctgcagggtcctatttgggccaagattcctcacacagatggcaactttcacccgtctcctttaatgggcggctttggacttaaacatccgcctcctcagatcctcatcaaaaacactcctgttcctgcggatcctccaacagcgttcaaccaggccaagctgaattctttcatcacgcagtacagcaccggacaagtcagcgtggagatcgagtgggagctgcagaaggagaacagcaagcgctggaacccagagattcagtatacttccaactactacaaatctacaaatgtggactttgctgttaatactgagggtgtttactctgagcctcgccccattggcactcgttacctcacccgtaatctgtaa

SEQ ID NO: 457 - protein, 738 aa, Artificial Sequence
  source: /note="Description of Artificial Sequence: Synthetic polypeptide"
MAADGYLPDWLEDNLSEGIREWWDLKPGAPKPKANQQKQDDGRGLVLPGYKYLGPFNGLDKGEPVNAADAAALEHDKAYDQQLKAGDNPYLRYNHADAEFQERLQEDTSFGGNLGRAVFQAKKRVLEPLGLVEEGAKTAPGKKRPVEPSPQRSPDSSTGIGKKGQQPARKRLNFGQTGDSESVPDPQPIGEPPAAPSSVGSGTMAAGGGAPMADNNEGADGVGSSSGNWHCDSTWLGDRVITTSTRTWALPTYNNHLYKQISNGTSGGSTNDNTYFGYSTPWGYFDFNRFHCHFSPRDWQRLINNNWGFRPKRLSFKLFNIQVKEVTQNEGTKTIANNLTSTIQVFTDSEYQLPYVLGSAHQGCLPPFPADVFMIPQYGYLTLNNGSQAVGRSSFYCLEYFPSQMLRTGNNFSFSYTFEDVPFHSSYAHSQSLDRLMNPLIDQYLYYLSRTQSTGGTAGTQQLLFSQAGPSNMSAQARNWLPGPCYRQQRVSTTLSQNNNSNFAWTGATKYHLNGRDSLVNPGVAMATNKDDEDRFFPSSGILMFGKQGAGKDNVDYSNVMLTSEEEIKATNPVATEQYGVVADNLQQQNTAPIVGAVNSQGALPGMVWQNRDVYLQGPIWAKIPHTDGNFHPSPLMGGFGLKHPPPQILIKNTPVPADPPTAFNQAKLNSFITQYSTGQVSVEIEWELQKENSKRWNPEIQYTSNYYKSTNVDFAVNTEGVYSEPRPIGTRYLTRNL

SEQ ID NO: 458 - DNA, 2217 bp, Artificial Sequence
  source: /note="Description of Artificial Sequence: Synthetic polynucleotide"
atggctgccgatggttatcttccagattggctcgaggacaacctctctgagggcattcgcgagtggtgggacctgaaacctggagccccgaaacccaaagccaaccagcaaaagcaggacgacggccggggtctggtgcttcctggctacaagcacctcggacccttcaacggactcgacaagggggagcccgtcaacgcggcggacgcagcggccctcgagcacgacaaggcctacgaccagcagctcaaagcgggtgacaatccgtacctgcggtataatcacgctgacgccgagtttcaggagcgtctgcaagaagatacgtcttttgggggcaacctcgggcgagcagtcttccaggccaagaagcgggttctcgaacctctcggtctggttgaggaaggcgctaagacggctcctggaaagaagagaccggtagagccgtcaccacagcgttcccccgactcctccacgggcatcggcaagaaaggccagcagcccgccagaaagagactcaatttcggtcagactggcgactcagagtcagtccccgaccctcaacctatcggagaacctccagcagcgccctctagtgtgggatctggtacaatggctgcaggcggtggcgcaccaatggcagacaataacgaaggtgccgacggagtgggtagttcctcgggaaattggcattgcgattccacatggctgggcgacagagtcatcaccaccagcacccgaacctgggccctgcccacctacaacaaccacctctacaagcaaatctccaacgggacctcgggaggcagcaccaacgacaacacctactttggctacagcaccccctgggggtattttgactttaacagattccactgccacttctcaccacgtgactggcagcgactcatcaacaacaactggggattccggcccaagagactcagcttcaagctcttcaacatccaggtcaaagaggtcacgcagaatgaaggcaccaagaccatcgccaataaccttaccagcacggttcaggtcttttcggactcggaataccagctgccctacgtcctcggctccgcacaccagggctgcctgcctccgttcccggcggacgtcttcatgattccccagtacggctacctgactctgaacaatggcagccaatcggtgggtcgttcctctttctactgcctggaatatttcccttctcaaatgctgagaacgggcaacaacttcaccttcagctacaccttcgaggacgttcccttccacagcagctacgcacacagccagagcctggaccggctgatgaatcctcttatcgaccagtacctgtattacctggccagaacacagagcaacgcaggaggcacagctggcaatcgggaactgcagttttatcagggcgggcctaccaccatggccgaacaagccaaaaactggctgcctggaccttgcttccggcaacaaagagtctccaagacgctggatcaaaacaacaacagcaactttgcttggactggtgccaccaaataccatctaaatggaagaaattcattggttaatcccggtgtcgccatggcaacccacaaggacgacgaggaacgcttcttcccttcgagcggagtcctgatttttggaaaaactggagcagctaataagactacactggaaaatgtgttaatgacaaatgaagaggaaattcgtcctaccaacccggtagccaccgaggaatacgggactgttagcagcaacctgcaggcggctaacactgcagcccagacacaagttgtcaacaaccagggagccttacctggtatggtctggcagaaccgggacgtgtacctgcagggtcccatctgggccaagattcctcacacggacggcaactttcacccgtctccgctgatgggcggctttggactgaagcatccgcctcctcagatcctgatcaaaaacactcctgttcctgctaatcccccggaggtgtttacgcctgccaagtttgcttctttcatcacacagtacagcaccggccaggtcagcgtggagatcgagtgggagctgcagaaggagaacagcaagcgctggaacccagagattcagtatacctccaattttgacaaacagactggtgtggactttgccgttgacagccagggtgtttattctgagcctcgccccattggtactcgttacctcacccgtaatctgtaa

SEQ ID NO: 459 - protein, 738 aa, Artificial Sequence
  source: /note="Description of Artificial Sequence: Synthetic polypeptide"
MAADGYLPDWLEDNLSEGIREWWDLKPGAPKPKANQQKQDDGRGLVLPGYKHLGPFNGLDKGEPVNAADAAALEHDKAYDQQLKAGDNPYLRYNHADAEFQERLQEDTSFGGNLGRAVFQAKKRVLEPLGLVEEGAKTAPGKKRPVEPSPQRSPDSSTGIGKKGQQPARKRLNFGQTGDSESVPDPQPIGEPPAAPSSVGSGTMAAGGGAPMADNNEGADGVGSSSGNWHCDSTWLGDRVITTSTRTWALPTYNNHLYKQISNGTSGGSTNDNTYFGYSTPWGYFDFNRFHCHFSPRDWQRLINNNWGFRPKRLSFKLFNIQVKEVTQNEGTKTIANNLTSTVQVFSDSEYQLPYVLGSAHQGCLPPFPADVFMIPQYGYLTLNNGSQSVGRSSFYCLEYFPSQMLRTGNNFTFSYTFEDVPFHSSYAHSQSLDRLMNPLIDQYLYYLARTQSNAGGTAGNRELQFYQGGPTTMAEQAKNWLPGPCFRQQRVSKTLDQNNNSNFAWTGATKYHLNGRNSLVNPGVAMATHKDDEERFFPSSGVLIFGKTGAANKTTLENVLMTNEEEIRPTNPVATEEYGTVSSNLQAANTAAQTQVVNNQGALPGMVWQNRDVYLQGPIWAKIPHTDGNFHPSPLMGGFGLKHPPPQILIKNTPVPANPPEVFTPAKFASFITQYSTGQVSVEIEWELQKENSKRWNPEIQYTSNFDKQTGVDFAVDSQGVYSEPRPIGTRYLTRNL

SEQ ID NO: 460 - protein, 737 aa, Artificial Sequence
  source: /note="Description of Artificial Sequence: Synthetic polypeptide"
MAADGYLPDWLEDNLSEGIREWWDLKPGAPKPKANQQKQDDGRGLVLPGYKYLGPFNGLDKGEPVNAADAAALEHDKAYDQQLKAGDNPYLRYNHADAEFQERLQEDTSFGGNLGRAVFQAKKRVLEPLGLVEEAAKTAPGKKRPVEPSPQRSPDSSTGIGKKGQQPARKRLNFGQTGDSESVPDPQPIGEPPAGPSGLGSGTMAAGGGAPMADNNKGADGVGNASGNWHCDSTWLGDRVITTSTRTWALPTYNNHLYKQISSQSAGSTNDNVYFGYSTPWGYFDFNRFHCHFSPRDWQRLINSNWGFRPKKLNFKLFNIQVKEVTTNDGVTTIANNLTSTVQVFSDSEYQLPYVLGSAHQGCLPPFPADVFMIPQYGYLTLNNGSQSVGRSSFYCLEYFPSQMLRTGNNFTFSYTFEDVPFHSSYAHSQSLDRLMNPLIDQYLYYLARTQSNAGGTAGNRELQFYQGGPTTMAEQAKNWLPGPCFRQQRVSKTLDQNNNSNFAWTGATKYHLNGRNSLVNPGVAMATHKDDEERFFPSSGVLIFGKTGAANKTTLENVLMTNEEEIRPTNPVATEEYGTVSSNLQAANTAAQTQVVNNQGALPGMVWQNRDVYLQGPIWAKIPHTDGNFHPSPLMGGFGLKHPPPQILIKNTPVPANPPEVFTPAKFASFITQYSTGQVSVEIEWELQKENSKRWNPEIQYTSNFDKQTGVDFAVDSQGVYSEPRPIGTRYLTRNL

SEQ ID NO: 461 - protein, 737 aa, Artificial Sequence
  source: /note="Description of Artificial Sequence: Synthetic polypeptide"
MAADGYLPDWLEDNLSEGIREWWDLKPGAPKPKANQQKQDDGRGLVLPGYKYLGPFNGLDKGEPVNAADAAALEHDKAYDQQLKAGDNPYLRYNHADAEFQERLQEDTSFGGNLGRAVFQAKKRVLEPLGLVEEAAKTAPGKKRPVEPSPQRSPDSSTGIGKKGQQPARKRLNFGQTGDSESVPDPQPIGEPPAGPSGLGSGTMAAGGGAPMADNNEGADGVGNASGNWHCDSTWLGDRVITTSTRTWALPTYNNHLYKQISSQSAGSTNDNVYFGYSTPWGYFDFNRFHCHFSPRDWQRLINSNWGFRPKKLNFKLFNIQVKEVTTNDGVTTIANNLTSTVQVFSDSEYQLPYVLGSAHQGCLPPFPADVFMIPQYGYLTLNNGSQSVGRSSFYCLEYFPSQMLRTGNNFTFSYTFEDVPFHSSYAHSQSLDRLMNPLIDQYLYYLARTQSNAGGTAGNRELQFYQGGPTTMAEQAKNWLPGPCFRQQRVSKTLDQNNNSNFAWTGATKYHLNGRNSLVNPGVAMATHKDDEERFFPSSGVLIFGKTGAANKTTLENVLMTNEEEIRPTNPVATEEYGTVSSNLQAANTAAQTQVVNNQGALPGMVWQNRDVYLQGPIWAKIPHTDGNFHPSPLMGGFGLKHPPPQILIKNTPVPANPPEVFTPAKFASFITQYSTGQVSVEIEWELQKENSKRWNPEIQYTSNFDKQTGVDFAVDSQGVYSEPRPIGTRYLTRNL

SEQ ID NO: 462 - protein, 737 aa, Artificial Sequence
  source: /note="Description of Artificial Sequence: Synthetic polypeptide"
MAADGYLPDWLEDNLSEGIREWWDLKPGAPKPKANQQKQDDGRGLVLPGYKYLGPFNGLDKGEPVNAADAAALEHDKAYDQQLKAGDNPYLRYNHADAEFQERLQEDTSFGGNLGRAVFQAKKRVLEPLGLVEEAAKTAPGKKRPVEPSPQRSPDSSTGIGKKGQQPARKRLNFGQTGDSESVPDPQPIGEPPAGPSGLGSGTMAAGGGAPMADNNEGADGVGNASGNWHCDSTWLGDRVITTSTRTWALPTYNNHLYKQISSQSAGSTNDNVYFGYSTPWGYFDFNRFHCHFSPRDWQRLINNNWGFRPKKLNFKLFNIQVKEVTTNDGVTTIANNLTSTVQVFSDSEYQLPYVLGSAHQGCLPPFPADVFMIPQYGYLTLNNGSQSVGRSSFYCLEYFPSQMLRTGNNFTFSYTFEDVPFHSSYAHSQSLDRLMNPLIDQYLYYLARTQSNAGGTAGNRELQFYQGGPTTMAEQAKNWLPGPCFRQQRVSKTLDQNNNSNFAWTGATKYHLNGRNSLVNPGVAMATHKDDEERFFPSSGVLIFGKTGAANKTTLENVLMTNEEEIRPTNPVATEEYGTVSSNLQAANTAAQTQVVNNQGALPGMVWQNRDVYLQGPIWAKIPHTDGNFHPSPLMGGFGLKHPPPQILIKNTPVPANPPEVFTPAKFASFITQYSTGQVSVEIEWELQKENSKRWNPEIQYTSNFDKQTGVDFAVDSQGVYSEPRPIGTRYLTRNL

SEQ ID NO: 463 - protein, 737 aa, Artificial Sequence
  source: /note="Description of Artificial Sequence: Synthetic polypeptide"
MAADGYLPDWLEDNLSEGIREWWDLKPGAPKPKANQQKQDDGRGLVLPGYKYLGPFNGLDKGEPVNAADAAALEHDKAYDQQLKAGDNPYLRYNHADAEFQERLQEDTSFGGNLGRAVFQAKKRVLEPLGLVEEAAKTAPGKKRPVEPSPQRSPDSSTGIGKKGQQPARKRLNFGQTGDSESVPDPQPIGEPPAGPSGLGSGTMAAGGGAPMADNNKGADGVGNASGNWHCDSTWLGDRVITTSTRTWALPTYNNHLYKQISSQSAGSTNDNVYFGYSTPWGYFDFNRFHCHFSPRDWQRLINNNWGFRPKKLNFKLFNIQVKEVTTNDGVTTIANNLTSTVQVFSDSEYQLPYVLGSAHQGCLPPFPADVFMIPQYGYLTLNNGSQSVGRSSFYCLEYFPSQMLRTGNNFTFSYTFEDVPFHSSYAHSQSLDRLMNPLIDQYLYYLARTQSNAGGTAGNRELQFYQGGPTTMAEQAKNWLPGPCFRQQRVSKTLDQNNNSNFAWTGATKYHLNGRNSLVNPGVAMATHKDDEERFFPSSGVLIFGKTGAANKTTLENVLMTNEEEIRPTNPVATEEYGTVSSNLQAANTAAQTQVVNNQGALPGMVWQNRDVYLQGPIWAKIPHTDGNFHPSPLMGGFGLKHPPPQILIKNTPVPANPPEVFTPAKFASFITQYSTGQVSVEIEWELQKENSKRWNPEIQYTSNFDKQTGVDFAVDSQGVYSEPRPIGTRYLTRNL

SEQ ID NO: 464 - DNA, 2214 bp, Artificial Sequence
  source: /note="Description of Artificial Sequence: Synthetic polynucleotide"
atggctgctgacggttatcttccagattggctcgaggacaacctctctgagggcattcgcgagtggtgggacctgaaacctggagcccccaagcccaaggccaaccagcagaagcaggacgacggccggggtctggtgcttcctggctacaagtacctcggacccttcaacggactcgacaagggggagcccgtcaacgcggcggacgcagcggccctcgagcacgacaaggcctacgaccagcagctcaaagcgggtgacaatccgtacctgcggtataaccacgccgacgccgagtttcaggagcgtctgcaagaagatacgtcttttgggggcaacctcgggcgagcagtcttccaggccaagaagcgggttctcgaacctctcggtctggttgaggaagctgctaagacggctcctggaaagaagagaccggtagaaccgtcacctcagcgttcccccgactcctccacgggcatcggcaagaaaggccagcagcccgctagaaagagactgaactttgggcagactggcgactcagagtcagtccccgaccctcaaccaatcggagaaccaccagcaggcccctctggtctgggatctggtacaatggctgcaggcggtggcgcaccaatggctgacaataacaagggcgccgacggagtgggtaatgcctcaggaaattggcattgcgattccacatggctgggcgacagagtcatcaccaccagcacccgaacctgggctttgcccacctacaacaaccacctctacaagcaaatctccagtcagtcagcaggtagcaccaacgacaacgtctacttcggctacagcaccccctgggggtattttgacttcaacagattccactgtcacttctcaccacgtgactggcagcggctcatcaacagcaactggggattccggcccaagaagctcaacttcaagctgttcaacatccaggtcaaggaggtcacaacgaatgacggcgtcacgaccatcgccaataaccttaccagcacggttcaggtcttttcggactcggaataccagctgccctacgtcctcggctccgcacaccagggctgcctgcctccgttcccggcggacgtcttcatgattccccagtacggctacctgactctgaacaatggcagccaatcggtgggtcgttcctctttctactgcctggaatatttcccttctcaaatgctgagaacgggcaacaacttcaccttcagctacaccttcgaggacgttcccttccacagcagctacgcacacagccagagcctggaccggctgatgaatcctcttatcgaccagtacctgtattacctggccagaacacagagcaacgcaggaggcacagctggcaatcgggaactgcagttttatcagggcgggcctaccaccatggccgaacaagccaaaaactggctgcctggaccttgcttccggcaacaaagagtctccaagacgctggatcaaaacaacaacagcaactttgcttggactggtgccaccaaataccatctaaatggaagaaattcattggttaatcccggtgtcgccatggcaacccacaaggacgacgaggaacgcttcttcccttcgagcggagtcctgatttttggaaaaactggagcagctaataagactacactggaaaatgtgttaatgacaaatgaagaggaaattcgtcctaccaacccggtagccaccgaggaatacgggactgttagcagcaacctgcaggcggctaacactgcagcccagacacaagttgtcaacaaccagggagccttacctggtatggtctggcagaaccgggacgtgtacctgcagggtcccatctgggccaagattcctcacacggacggcaactttcacccgtctccgctgatgggcggctttggactgaagcatccgcctcctcagatcctgatcaaaaacactcctgttcctgctaatcccccggaggtgtttacgcctgccaagtttgcttctttcatcacacagtacagcaccggccaggtcagcgtggagatcgagtgggagctgcagaaggagaacagcaagcgctggaacccagagattcagtatacctccaattttgacaaacagactggtgtggactttgccgttgacagccagggtgtttattctgagcctcgccccattggtactcgttacctcacccgtaatctgtaa

SEQ ID NO: 465 - DNA, 2217 bp, Artificial Sequence
  source: /note="Description of Artificial Sequence: Synthetic polynucleotide"
atggctgccgatggttatcttccagattggctcgaggacaacctctctgagggcattcgcgagtggtgggacctgaaacctggagccccgaaacccaaagccaaccagcaaaagcaggacgacggccggggtctggtgcttcctggctacaagtacctcggacccttcaacggactcgacaagggggagcccgtcaacgcggcggacgcagcggccctcgagcacgacaaggcctacgaccagcagctcaaagcgggtgacaatccgcacctgcggtataatcacgccgacgccgagtttcaggagcgtctgcaagaagatacgtcttttgggggcaacctcgggcgagcagtcttccaggccaagaagcgggttctcgaacctctcggtctggttgaggaaggcgctaagacggctcctggaaagaagagaccggtagagccgtcaccacagcgttcccccgactcctccacgggcatcggcaagaaaggccagcagcccgccagaaagagactcaatttcggtcagactggcgactcagagtcagtccccgaccctcaacttatcggagaacctccagcagcgccctctagtgtgggatctggtacaatggctgcaggcggtggcgcaccaatggcagacaataacgaaggtgccgacggagtgggtagttcctcgggaaattggcattgcgattccacatggctgggcgacagagtcatcaccaccagcacccgaacctgggccctgcccacctacaacaaccacctctacaagcaaatctccaacgggacctcgggaggcagcaccaacgacaacacctactttggctacagcaccccctgggggtattttgactttaacagattccactgccacttctcaccacgtgactggcagcgactcatcaacaacaactggggattccggcccaagagactcagcttcaagctcttcaacatccaggtcaaagaggtcacgcagaatgaaggcaccaagaccatcgccaataacctcaccagcaccatccaggtgtttacggactcggagtaccagctgccgtacgtcctcggctctgcccaccagggctgcctgcctccgttcccggcggacgtcttcatgattcctcagtacggcaacctgactctcaacaacggtagtcaggccgtgggacgttcctccttctactgcctggagtacttcccctctcagatgctgagaacgggcaacaacttttccttcagctacactttcgaggacgtgcctttccacagcagctacgcgcacagccagagtttggacaggctgatgaatcctctcatcgaccagtacctgtactacctgtcaagaacccagtctacgggaggcacagcgggaacccagcagttgctgttttctcaggccgggcctagcaacatgtcggctcaggccagaaactggctgcctggaccctgctacagacagcagcgcgtctccacgacactgtcgcaaaacaacaacagcaactttgcctggactggtgccaccaagtatcatctgaacggcagagactctctggtgaatccgggcgtcgccatggcaaccaacaaggacgacgaggaccgcttcttcccatccagcggcatcctcatgtttggcaagcagggagctggaaaagacaacatgggctatagcaacgtgatgctaaccagcgaggaagaaatcaagaccaccaaccccgtggccacagaacagtatggcgtggtggctgataacctacagcagcaaaacaccgctcctattgtgggggccgtcaacagccagggagccttacctggcatggtctggcagaaccgggacgtgtacctgcagggtcctatttgggccaagattcctcacacagatggcaactttcacccgtctcctttaatgggcggctttggacttaaacatccgcctcctcagatcctcatcaaaaacactcctgttcctgcggatcctccaacagcgttcaaccaggccaagctgaattctttcatcacgcagtacggcaccggacaagtcagcgtggagatcgagtgggagctgcagaaggagaacagcaagcgctggaacccagagattcagtatacttccaactactacaaatctacaaatgtggactttgctgttaatactgagggtgtttactctgagcctcgccccattggcactcgttacctcacccgtaatctgtaa

SEQ ID NO: 466 - protein, 738 aa, Artificial Sequence
  source: /note="Description of Artificial Sequence: Synthetic polypeptide"
MAADGYLPDWLEDNLSEGIREWWDLKPGAPKPKANQQKQDDGRGLVLPGYKYLGPFNGLDKGEPVNAADAAALEHDKAYDQQLKAGDNPHLRYNHADAEFQERLQEDTSFGGNLGRAVFQAKKRVLEPLGLVEEGAKTAPGKKRPVEPSPQRSPDSSTGIGKKGQQPARKRLNFGQTGDSESVPDPQLIGEPPAAPSSVGSGTMAAGGGAPMADNNEGADGVGSSSGNWHCDSTWLGDRVITTSTRTWALPTYNNHLYKQISNGTSGGSTNDNTYFGYSTPWGYFDFNRFHCHFSPRDWQRLINNNWGFRPKRLSFKLFNIQVKEVTQNEGTKTIANNLTSTIQVFTDSEYQLPYVLGSAHQGCLPPFPADVFMIPQYGNLTLNNGSQAVGRSSFYCLEYFPSQMLRTGNNFSFSYTFEDVPFHSSYAHSQSLDRLMNPLIDQYLYYLSRTQSTGGTAGTQQLLFSQAGPSNMSAQARNWLPGPCYRQQRVSTTLSQNNNSNFAWTGATKYHLNGRDSLVNPGVAMATNKDDEDRFFPSSGILMFGKQGAGKDNMGYSNVMLTSEEEIKTTNPVATEQYGVVADNLQQQNTAPIVGAVNSQGALPGMVWQNRDVYLQGPIWAKIPHTDGNFHPSPLMGGFGLKHPPPQILIKNTPVPADPPTAFNQAKLNSFITQYGTGQVSVEIEWELQKENSKRWNPEIQYTSNYYKSTNVDFAVNTEGVYSEPRPIGTRYLTRNL

SEQ ID NO: 467 - DNA, 2217 bp, Artificial Sequence
  source: /note="Description of Artificial Sequence: Synthetic polynucleotide"
atggctgccgatggttatcttccagattggctcgaggacaacctctctgagggcattcgcgagtggtgggacctgaaacctggagccccgaaacccaaagccaaccagcaaaagcaggacgacggccggggtctggtgcttcctggctacaagtacctcggacccttcaacggactcgacaagggggagcccgtcaacgcggcggacgcagcggccctcgagcacgacaaggcctacgaccagcagctcaaagcgggtgacaatccgtacctgcggtataatcacgccgacgccgagtttcaggagcgtctgcaagaagatacgtcttttgggggcaacctcgggcgagcagtcttccaggccaagaagcgggttctcgaacctctcggtctggttgaggaaggcgctaagacggctcctggaaagaagagaccggtagagccgtcaccacagcgttcccccgactcctccacgggcatcggcaagaaaggccagcagcccgccggaaagagactcaatttcggtcagactggcgactcagagtcagtccccgaccctcaacctatcggagaacctccagcagcgccctctagtgtgggatctggtacaatggctgcaggcggtggcgcaccaatggcagacaataacgaaggtgccgacggagtgggtagttcctcgggaaattggcattgcgattccacatggctgggcgacagagtcatcaccaccagcacccgaacctgggccctgcccacctacaacaaccacctctacaagcaaatctccaacgggacctcgggaggcagcaccaacgacaacacctactttggctacagcaccccctgggggtattttgactttaacagattccactgccacttctcaccacgtgactggcagcgactcatcaacaacaactggggattccggcccaagagactcagcttcaagctcttcaacatccaggtcaaagaggtcacgcagaatgaaggcaccaagaccatcgccaataacctcaccagcaccatccaggtgtttacggactcggaataccagctgccgtacgtcctcggctctgcccaccagggctgcctgcctccgttcccggcggacgtcttcatgattcctcagtacggctacctgactctcaacaacggtagtcaggccgtgggacgttcctccttctactgcctggagtacttcccctctcagatgctgagaacgggcaacaacttttccttcagctacactttcgaggacgtgcctttccacagcagctacgcgcacagccagagtttggacaggctgatgaatcctctcgtcgaccagtacctgtactacctgtcaagaacccagtctacgggaggcacagcgggaacccagcagttgctgttttctcaggccgggcctagcaacatgtcggctcaggccagaaactggctgcctggaccctgctacagacagcagcgcgtctccacgacactgtcgcaaaacaacaacagcaactttgcctggactggtgccaccaagtatcatctgaacggcagagactctctggtgaatccgggcgtcgccatggcaaccaacaaggacgacgaggaccgcttcttcccatccagcggcatcctcatgtttggcaagcagggagctggaaaagacaacgtggactatagcaacgtgatgctaaccagcgaggaagaaatcaagaccaccaaccccgtggccacagaacagtatggcgtggtggctgataacctacagcagcaaaacaccgctcctattgtgggggccgtcaacagccagggagccttacctggcatggtctggcagaaccgggacgtgtacctgcagggtcctatttgggccaagattcctcacacagatggcaactttcacccgtctcctttaatgggcggctttggacttaaacatccgcctcctcagatcctcatcaaaaacactcctgttcctgcggatcctccaacagcgttcaaccaggccaagctgaattctttcatcacgcagtacagcaccggacaagtcagcgtggagatcgagtgggagctgcagaaggagaacagcaagcgctggagcccagagattcagtatacttccaactactacaaatctacaaatgtggactttgctgttaatactgagggtgtttactctgagcctcgccccattggcactcgttacctcacccgtaatctgtaa

SEQ ID NO: 468 - protein, 738 aa, Artificial Sequence
  source: /note="Description of Artificial Sequence: Synthetic polypeptide"
MAADGYLPDWLEDNLSEGIREWWDLKPGAPKPKANQQKQDDGRGLVLPGYKYLGPFNGLDKGEPVNAADAAALEHDKAYDQQLKAGDNPYLRYNHADAEFQERLQEDTSFGGNLGRAVFQAKKRVLEPLGLVEEGAKTAPGKKRPVEPSPQRSPDSSTGIGKKGQQPAGKRLNFGQTGDSESVPDPQPIGEPPAAPSSVGSGTMAAGGGAPMADNNEGADGVGSSSGNWHCDSTWLGDRVITTSTRTWALPTYNNHLYKQISNGTSGGSTNDNTYFGYSTPWGYFDFNRFHCHFSPRDWQRLINNNWGFRPKRLSFKLFNIQVKEVTQNEGTKTIANNLTSTIQVFTDSEYQLPYVLGSAHQGCLPPFPADVFMIPQYGYLTLNNGSQAVGRSSFYCLEYFPSQMLRTGNNFSFSYTFEDVPFHSSYAHSQSLDRLMNPLVDQYLYYLSRTQSTGGTAGTQQLLFSQAGPSNMSAQARNWLPGPCYRQQRVSTTLSQNNNSNFAWTGATKYHLNGRDSLVNPGVAMATNKDDEDRFFPSSGILMFGKQGAGKDNVDYSNVMLTSEEEIKTTNPVATEQYGVVADNLQQQNTAPIVGAVNSQGALPGMVWQNRDVYLQGPIWAKIPHTDGNFHPSPLMGGFGLKHPPPQILIKNTPVPADPPTAFNQAKLNSFITQYSTGQVSVEIEWELQKENSKRWSPEIQYTSNYYKSTNVDFAVNTEGVYSEPRPIGTRYLTRNL

SEQ ID NO: 469 - DNA, 2217 bp, Artificial Sequence
  source: /note="Description of Artificial Sequence: Synthetic polynucleotide"
atggttgccgatggttatcttccagattggctcgaggacaacctctctgagggcattcgcgagtggtgggacctgaaacctggagccccgaaacccaaagccaaccagcaaaagcagggcgacggccggggtctggtgcttcctggctacaagtacctcggacccttcaacggactcgacaagggggagcccgtcaacgcggcggacgcagcggccctcgagcacgacaaggcctacgaccagcagcttaaagcgggtgacaatccgtacctgcggtataatcacgccgacgccgagcttcaggagcgtctgcaagaagatacgtcttttgggggcaacctcgggcgagcagtcttccaggccaagaagcgggttctcgaacctctcggtctggttgaggaaggcgctaagacggctcctggaaagaagagaccggtagagccgtcaccacagcgttcccccgactcctccacgggcatcggcaagaaaggccagcagcccgccagaaagagactcaatttcggtcagactggcgactcagagtcagtccccgaccctcaacctatcggagaacctccagcagcgccctctagtgtgggatctggtacaatggctgcaggcggtggcgcgccaatggcagacaataacgaaggtgccgacggagtgggtagttcctcgggaaattggcattgcgattccacatggctgggcgacagagtcatcaccaccagcacccgaacctgggccctgcccacctacaacaaccacctctacaagcaaatctccaacgggacctcgggaggcagcaccaacgacaacacctactttggctacagcaccccctgggggtattttgactttaacagattccactgccacttctcaccacgtgactggcagcgactcatcaacaacaactggggattccggcccaagagactcagcttcaagctcttcaacatccaggtcaaagaggtcacgcagaatgaaggcaccaagaccatcgccaataacctcaccagcaccatccaggtgtttacggactcggaataccagctgccgtacgtcctcggctctgcccaccagggctgccagcctccgttcccggcggacgtcttcatgattcctcagtacggctacctgactctcaacaacggtagtcaggccgtgggacgttcctccttctactgcctggagtacttcccctctcagatgctgagaacgggcaacaacttttccttcagctacactttcgaggacgtgcctttccacagcagctacgcgcacagccagagtttggacaggctgatgaatcctctcatcgaccagtacctgtactacctgtcaagaacccagtctacgggaggcacagcgggaacccagcagttgctgttttctcaggccgggcctagcaacatgtcggctcaggccagaaactggctgcctggaccctgctacagacagcagcgcgtctccacgacactgtcgcaaaacaacaacagcaactttgcctggactggtgccaccaagtatcatctgaacggcagagactctctggtgaatccgggcgtcgccatggcaaccaacaaggacgacgaggaccgcttcttcccatccagcggcatcctcatgtttggcaagcagggagctggaaaagacaacgtggactatagcaacgtgatgctaaccagcgaggaagaaatcaagaccaccaaccccgtggccacagaacagtatggcgtggtggctgataacctacagcagcaaaacaccgctcctattgtgggggccgtcaacagccagggagccttacctggcatggtctggcagaaccgggacgtgtacctgcagggtcctatttgggccaagattcctcacacagatggcaactttcacccgtctcctttaatgggcggctttggacttaaacatccgcctcctcagatcctcatcaaaaacactcctgttcctgcggatcctccaacagcgttcaaccaggccaagctgaattctttcatcacgcagtacagcaccggacaagtcagcgtggagatcgagtgggagccgcagaaggagaacagcaagcgctggaacccagagattcagtatacttccaactactacaaatctacaaatgtggactttgctgttaatactgagggtgtttactctgagcctcgccccattggcactcgttacctcacccgtaatctgtaa

SEQ ID NO: 470 - protein, 738 aa, Artificial Sequence
  source: /note="Description of Artificial Sequence: Synthetic polypeptide"
MVADGYLPDWLEDNLSEGIREWWDLKPGAPKPKANQQKQGDGRGLVLPGYKYLGPFNGLDKGEPVNAADAAALEHDKAYDQQLKAGDNPYLRYNHADAELQERLQEDTSFGGNLGRAVFQAKKRVLEPLGLVEEGAKTAPGKKRPVEPSPQRSPDSSTGIGKKGQQPARKRLNFGQTGDSESVPDPQPIGEPPAAPSSVGSGTMAAGGGAPMADNNEGADGVGSSSGNWHCDSTWLGDRVITTSTRTWALPTYNNHLYKQISNGTSGGSTNDNTYFGYSTPWGYFDFNRFHCHFSPRDWQRLINNNWGFRPKRLSFKLFNIQVKEVTQNEGTKTIANNLTSTIQVFTDSEYQLPYVLGSAHQGCQPPFPADVFMIPQYGYLTLNNGSQAVGRSSFYCLEYFPSQMLRTGNNFSFSYTFEDVPFHSSYAHSQSLDRLMNPLIDQYLYYLSRTQSTGGTAGTQQLLFSQAGPSNMSAQARNWLPGPCYRQQRVSTTLSQNNNSNFAWTGATKYHLNGRDSLVNPGVAMATNKDDEDRFFPSSGILMFGKQGAGKDNVDYSNVMLTSEEEIKTTNPVATEQYGVVADNLQQQNTAPIVGAVNSQGALPGMVWQNRDVYLQGPIWAKIPHTDGNFHPSPLMGGFGLKHPPPQILIKNTPVPADPPTAFNQAKLNSFITQYSTGQVSVEIEWEPQKENSKRWNPEIQYTSNYYKSTNVDFAVNTEGVYSEPRPIGTRYLTRNL

SEQ ID NO: 471 - DNA, 2217 bp, Artificial Sequence
  source: /note="Description of Artificial Sequence: Synthetic polynucleotide"
atggctgccgatggttatcttccagattggctcgaggacaacctctctgagggcattcgcgagtggtgggacctgaaacctggagccccgaaacccaaagccaaccagcaaaagcaggacgacggccggggtctggtgcttcctggctacaagtacctcggacccttcaacggactcgacaagggggagcccgtcaacgcggcggacgcagcggccctcgagcacgacaaggcctacgaccagcagctcaaagcgggtgacaatccgtacctgcggtataatcacgccgacgccgagtttcaggagcgtctgcaagaagatacgtcttttgggggcaacctcgggcgagcagtcttccaggccaagaagcgggttctcgaacctctcggtctggttgaggaaggcgctaagacggctcctggaaagaagagaccggtagagccgtcaccacagcgttcccccgactcctccacgggcatcggcaagaaaggccagcagcccgccagaaagagactcaatttcggtcagactggcgactcagagtcagtccccgaccctcaacctatcggagaacctccagcagcgccctctagtgtgggatctggtacaatggctgcaggcggtggcgcaccaatggcagacaataacgaaggtgccgacggagtgggtagttcctcgggaaattggcattgcgattccacatggctgggcgacagagtcatcaccaccagcacccgaacctgggccctgcccacctacaacaaccacctctacaagcaaatctccaacgggacctcgggaggcagcaccaacgacaacacctactttggctacagcaccccctgggggtattttgactttaacagattccactgccacttctcaccacgtgactggcagcgactcatcaacaacaactggggattccggcccaagagactcagcttcaagctcttcaacatccaggtcaaagaggtcacgcagaatgaaggcaccaagaccatcgccaatagcctcaccagcaccatccaggtgtttacggactcggaataccagctgccgtacgtcctcggctctgcccaccagggctgcctgcctccgttcccggcggacgtcttcatgattcctcagtacggctacctgactcccaacaacggtagtcaggccgtgggacgttcctccttctactgcctggagtacttcccctctcagatgctgagaacgggcaacaacttttccttcagctacactttcgaggacgtgcctttccacagcagctacgcgcacagccagagtttggacaggctgatgaatcctctcatcgaccagtacctgtactacctgtcaagaacccagtctacgggaggcacagcgggaacccagcagttgctgtcttctcaggccgggcctagcaacatgtcggctcaggccagaaactggctgcctggaccctgctacagacagcagcgcgtctccacgacactgtcgcaaaacaacaacagcaactttgcctggactggtgccaccaagtatcatctgaacggcagagactctctggtgaatccgggcgtcgccatggcaaccaacaaggacgacgaggaccgcttcttcccatccagcggcatcctcatgtttggcaagcagggagctggaaaagacaacgtggactatagcaacgtgatgctaaccagcgaggaagaaatcaagaccaccaaccccgtggccacagaacagtatggcgtggtggctgataacctacagcagcaaaacaccgctcctattgtgggggccgtcaacagccagggagccttacctggcatggtctggcagaaccgggacgtgtacttgcagggtcctatttgggccaagattcctcacacagatggcaactttcacccgtctcctttaatgggcggctttggacttaaacatccgcctcctcagatcctcatcaaaaacactcctgttcctgcggatcctccaacagcgttcaaccaggccaagctgaattctttcatcacgcagtacagcaccggacaagtcagcgtggagatcgagtgggagctgcagaaggagaacagcaagcgctggaacccagagattcagtatacttccaactactacaaatctacaaatgtggactttgctgttaatactgagggtgtttactctgagcctcgccccattggcactcgttacctcacccgtaatctgtaa

SEQ ID NO: 472 - protein, 738 aa, Artificial Sequence
  source: /note="Description of Artificial Sequence: Synthetic polypeptide"
MAADGYLPDWLEDNLSEGIREWWDLKPGAPKPKANQQKQDDGRGLVLPGYKYLGPFNGLDKGEPVNAADAAALEHDKAYDQQLKAGDNPYLRYNHADAEFQERLQEDTSFGGNLGRAVFQAKKRVLEPLGLVEEGAKTAPGKKRPVEPSPQRSPDSSTGIGKKGQQPARKRLNFGQTGDSESVPDPQPIGEPPAAPSSVGSGTMAAGGGAPMADNNEGADGVGSSSGNWHCDSTWLGDRVITTSTRTWALPTYNNHLYKQISNGTSGGSTNDNTYFGYSTPWGYFDFNRFHCHFSPRDWQRLINNNWGFRPKRLSFKLFNIQVKEVTQNEGTKTIANSLTSTIQVFTDSEYQLPYVLGSAHQGCLPPFPADVFMIPQYGYLTPNNGSQAVGRSSFYCLEYFPSQMLRTGNNFSFSYTFEDVPFHSSYAHSQSLDRLMNPLIDQYLYYLSRTQSTGGTAGTQQLLSSQAGPSNMSAQARNWLPGPCYRQQRVSTTLSQNNNSNFAWTGATKYHLNGRDSLVNPGVAMATNKDDEDRFFPSSGILMFGKQGAGKDNVDYSNVMLTSEEEIKTTNPVATEQYGVVADNLQQQNTAPIVGAVNSQGALPGMVWQNRDVYLQGPIWAKIPHTDGNFHPSPLMGGFGLKHPPPQILIKNTPVPADPPTAFNQAKLNSFITQYSTGQVSVEIEWELQKENSKRWNPEIQYTSNYYKSTNVDFAVNTEGVYSEPRPIGTRYLTRNL

SEQ ID NO: 473 - protein, 738 aa, Artificial Sequence
  source: /note="Description of Artificial Sequence: Synthetic polypeptide"
MAADGYLPDWLEDNLSEGIREWWDLKPGAPKPKANQQKQDDGRGLVLPGYKYLGPFNGLDKGEPVNAADAAALEHDKAYDQQLKAGDNPYLRYNHADAEFQERLQEDTSFGGNLGRAVFQAKKRVLEPLGLVEEGAKTAPGKKRPVEPSPQRSPDSSTGIGKKGQQPARKRLNFGQTGDSESVPDPQPIGEPPAAPSSVGSGTMAAGGGAPMADNNEGADGVGSSSGNWHCDSTWLGDRVITTSTRTWALPTYNNHLYKQISNGTSGGSTNDNTYFGYSTPWGYFDFNRFHCHFSPRDWQRLINNNWGFRPKRLSFKLFNIQVKEVTQNEGTKTIANNLTSTIQVFTDSEYQLPYVLGSAHQGCLPPFPADVFMIPQYGYLTLNNGSQAVGRSSFYCLEYFPSQMLRTGNNFSFSYTFEDVPFHSSYVHSQSLDRLMNPLIDQYLYYLSRTQSTGGTAGTQQLLFSQAGPSNMSAQARNWLPGPCYRQQRVSTTLSQNNNSNFAWTGATKYHLNGRDSLVNSGVAMATNKDDEDRFFPSSGILMFGKQGAGKDNVDYSNVMLTSEEEIKTTNPVATEQYGVVADNLQQQNTAPIVGAVNSQGALPGMVWQNRDVYLQGPIWAKIPHTDGNFHPSPLMGGFGLKHPPPQILIKNTPVPADPPTAFNQAKLNSFITQYSTGQVSVEIEWELQKENSKRWNPEIQYTSNYYKSTNVDFAVNTEGVYSEPRPIGTRYPTRNL

SEQ ID NO: 474 - DNA, 2217 bp, Artificial Sequence
  source: /note="Description of Artificial Sequence: Synthetic polynucleotide"
atggctgccgatggttatcttccagattggctcgaggacaacctctctgagggcattcgcgagtggtgggacctgaaacctggagccccgaaacccaaagccaaccagcaaaagcaggacgacggccggggtctggtgcttcctggctacaagtacctcggacccttcaacggactcgacaagggggagcccgtcaacgcggcggacgcagcggccctcgagcacgacaaggcctacgaccagcagctcaaagcgggtgacaatccgtacctgcggtataatcacgccgacgccgagtttcaggagcgtctgcaagaagatacgtcttttgggggcaacctcgggcgagcagtcttccaggccaagaagcgggttctcgaacctctcggtctggttgaggaaggcgctaagacggctcctggaaagaagagaccggtagagccgtcaccacagcgttcccccgactcctccacgggcatcggcaagaaaggccagcagcccgccagaaagagactcaatttcggtcagactggcgactcagagtcagtccccgaccctcaacctatcggagaacctccagcagcgccctctagtgtgggatctggtacaatggctgcaggcggtggcgcaccaatggcagacaataacgaaggtgccgacggagtgggtagttcctcgggaaattggcattgcgattccacatggctgggcgacagagtcatcaccaccagcacccgaacctgggccctgcccacctacaacaaccacctctacaagcaaatctccaacgggacctcgggaggcagcaccaacgacaacacctactttggctacagcaccccctgggggtattttgactttaacagattccactgccacttctcaccacgtgactggcagcgactcatcaacaacaactggggattccggcccaagagactcagcttcaagctcttcaacatccaggtcaaagaggtcacgcagaatgaaggcaccaagaccatcgccaataacctcaccagcaccatccaggtgtttacggactcggaataccagctgccgtacgtcctcggctctgcccaccagggctgcctgcctccgttcccggcggacgtcttcatgattcctcagtacggctacctgactctcaacaacggtagtcaggccgtgggacgttcctccttctactgcctggagtacttcccctctcagatgctgagaacgggcaacaacttttccttcagctacactttcgaggacgtgcctttccacagcagctacgtgcacagccagagtttggacaggctgatgaatcctctcatcgaccagtacctgtactacctgtcaagaacccagtctacgggaggcacagcgggaacccagcagttgctgttttctcaggccgggcctagcaacatgtcggctcaggccagaaactggctgcctggaccctgctacagacagcagcgcgtctccacgacactgtcgcaaaacaacaacagcaactttgcctggactggtgccaccaagtatcatctgaacggcagagactctctggtgaattcgggcgtcgccatggcaaccaacaaggacgacgaggaccgcttcttcccatccagcggcatcctcatgtttggcaagcagggagctggaaaagacaacgtggactatagcaacgtgatgctaaccagcgaggaagaaatcaagaccaccaaccccgtggccacagaacagtatggcgtggtggctgataacctacagcagcaaaacaccgctcctattgtgggggccgtcaacagccagggagccttacctggcatggtctggcagaaccgggacgtgtacctgcagggtcctatttgggccaagattcctcacacagatggcaactttcacccgtctcctttaatgggcggctttggacttaaacatccgcctcctcagatcctcatcaaaaacactcctgttcctgcggatcctccaacagcgttcaaccaggccaagctgaattctttcatcacgcagtacagcaccggacaagtcagcgtggagatcgagtgggagctgcagaaggagaacagcaagcgctggaacccagagattcagtatacttccaactactacaaatctacaaatgtggactttgctgttaatactgagggtgtttactctgagcctcgccccattggcactcgttaccccacccgtaatctgtaa

SEQ ID NO: 475 - protein, 734 aa, Artificial Sequence; identical to SEQ ID NO: 300
  source: /note="Description of Artificial Sequence: Synthetic polypeptide"

SEQ ID NO: 476 - DNA, 2214 bp, Artificial Sequence
  source: /note="Description of Artificial Sequence: Synthetic polynucleotide"
atggctgctgacggttatcttccagattggctcgaggacaacctctctgagggcattcgcgagtggtgggacctgaaacctggagccccgaaacccaaagccaaccagcagaagcaggacgacggccggggtctggtgcttcctggctacaagtacctcggacccttcaacggactcgacaagggggagcccgtcaacgcggcggacgcagcggccctcgagcacgacaaggcctacgaccagcagctcaaagcgggtgacaatccgtacctgcggtataaccacgccgacgccgagtttcaggagcgtctgcaagaagatacgtcttttgggggcaacctcgggcgagcagtcttccaggccaagaagcgggttctcgaacctctcggtctggttgaggaagctgctaagacggctcctggaaagaagagaccggtagaaccgtcacctcagcgttcccccgactcctccacgggcatcggcaagaaaggccagcagcccgctagaaagagactgaactttgggcagactggcgactcagagtcagtccccgaccctcaacctctcggagaaccaccagcaggcccctctggtctgggatctggtacaatggctgcaggcggtggcgctccaatggcagacaataacgaaggcgccgacggagtgggtaatgcctcaggaaattggcattgcgattccacatggctgggcgacagagtcatcaccaccagcacccgaacctgggctttgcccacctacaacaaccacctctacaagcaaatctccagtcagtcagcaggtagcaccaacgacaacgtctacttcggctacagcaccccctgggggtattttgacttcaacagattccactgtcacttctcaccacgtgactggcagcgactcatcaacaacaactggggattccggcccaagaagctcaacttcaagctcttcaacatccaagtcaaggaggtcacgacgaatgacggcgtcacgaccatcgctaataaccttaccagcacggttcaggtcttttcggactcggagtaccagctgccgtacgtcctcggctctgcccaccagggctgcctgcctccgttcccggcggacgtcttcatgattcctcagtacggctacctgactctgaacaatggcagccaatcggtgggacgttcatccttctactgcctggaatacttcccttctcaggtgctgagaacgggtaacaacttcaccttcagttacaccttcgaggacgtgcctttccacagcagctacgcgcacagccagagcctagaccggctgatgaatcccctcatcgaccagtacctgtattacctggctagaacacagagtaacccaggaggcacatctggcaatcgggaactgcagttttaccagggcgggccttccaccatggccgaacaagccaagaactggttacctggaccttgcttccggcaacaaagagtttccaaaacactggatcaaaacaacaacagcaactttgcttggactggtgccaccaaatatcacctgaacggcagaaactcattggtgaatcctggtgtcgccatggcaactcacaaggacgacgaggaccgctttttcccatccagcggagtcctgatttttggaaaaactggagcaaccaacaagactacattggaaaacgtgttaatgacaaatgaagaagaaattcgtcctactaatcctgtggccacagaagaatacgggatagtcagcagcaatttacaagcggccaatactgcagcccagacacaagttgtcaacaaccagggagccttacctggcatggtctggcagaaccgggacgtgtacctgcagggtcccatctgggccaaaattcctcacacagacggcaactttcacccgtctccgctgatgggcggctttggactgaagcatccgcctcctcagatcctgatcaaaaacactcctgttcctgctaatcccccggaggtgtttacgcctgccaagtttgcttctttcatcacacagtacagcaccggccaggtcagcgtggagatcgagtgggagctgcagaaggagaacagcaagcgctggaacccagagattcagtatacctccaattttgacaaacagactggtgtggactttgccgttgacagccagggtgtttattctgagcctcgccccattggtactcgttacctcacccgtaatctgtaa

SEQ ID NO: 477 - protein, 737 aa, Artificial Sequence
  source: /note="Description of Artificial Sequence: Synthetic polypeptide"
MAADGYLPDWLEDNLSEGIREWWDLKPGAPKPKANQQKQDDGRGLVLPGYKYLGPFNGLDKGEPVNAADAAALEHDKAYDQQLKAGDNPYLRYNHADAEFQERLQEDTSFGGNLGRAVFQAKKRVLEPLGLVEEAAKTAPGKKRPVEPSPQRSPDSSTGIGKKGQQPARKRLNFGQTGDSESVPDPQPLGEPPAGPSGLGSGTMAAGGGAPMADNNEGADGVGNASGNWHCDSTWLGDRVITTSTRTWALPTYNNHLYKQISSQSAGSTNDNVYFGYSTPWGYFDFNRFHCHFSPRDWQRLINNNWGFRPKKLNFKLFNIQVKEVTTNDGVTTIANNLTSTVQVFSDSEYQLPYVLGSAHQGCLPPFPADVFMIPQYGYLTLNNGSQSVGRSSFYCLEYFPSQVLRTGNNFTFSYTFEDVPFHSSYAHSQSLDRLMNPLIDQYLYYLARTQSNPGGTSGNRELQFYQGGPSTMAEQAKNWLPGPCFRQQRVSKTLDQNNNSNFAWTGATKYHLNGRNSLVNPGVAMATHKDDEDRFFPSSGVLIFGKTGATNKTTLENVLMTNEEEIRPTNPVATEEYGIVSSNLQAANTAAQTQVVNNQGALPGMVWQNRDVYLQGPIWAKIPHTDGNFHPSPLMGGFGLKHPPPQILIKNTPVPANPPEVFTPAKFASFITQYSTGQVSVEIEWELQKENSKRWNPEIQYTSNFDKQTGVDFAVDSQGVYSEPRPIGTRYLTRNL

SEQ ID NO: 478 - DNA, 2214 bp, Artificial Sequence
  source: /note="Description of Artificial Sequence: Synthetic polynucleotide"
atggctgccgatggttatcttccagattggctcgaggacaacctctctgagggcattcgcgagtggtgggacctgaaacctggagccccgaaacccaaagccaaccagcaaaagcaggacgacggccggggtctggtgcttcctggctacaagtacctcggacccttcaacggactcgacaagggggagcccgtcaacgcggcggacgcagcggccctcgagcacgacaaggcctacgaccagcagctcaaagcgggtgacaatccgtacctgcggtataatcacgccgacgccgagtttcaggagcgtctgcaagaagatacgtcttttgggggcaacctcgggcgagcagtcttccaggccaagaagcgggttctcgaacctctcggtctggttgaggaaggcgctaagacggctcctggaaagaagagaccggtagagccgtcaccacagcgttcccccgactcctccacgggcatcggcaagaaaggccagcagcccgccagaaagagactcaatttcggtcagactggcgactcagagtcagtccccgaccctcaacctatcggagaacctccagcagcgccctctagtgtgggatctggtacaatggctgcaggcggtggcgcaccaatggcagacaataacgaaggtgccgacggagtgggtagttcctcgggaaattggcattgcgattccacacggctgggcgacagagtcatcaccaccagcacccggacctgggctttgcccacctacaacaaccacctctacaagcaaatctccagtcagtcagcaggtagcaccaacgacaacgtctacttcggctacagcaccccctgggggtattttgacttcaacagattccactgtcacttctcaccacgtgactggcagcggctcatcaacaacaactggggattccggcccaagaagctcaacttcaagctgttcaacatccaggtcaaggaggtcacaacgaatgacggcgtcacgaccatcgccaataaccttaccagcacggttcaggtcttttcggactcggaataccagctgccctacgtcctcggctccgcacaccagggctgcctgcctccgttcccggcggacgtcttcatgattccccagtacggctacctgactctgaacaatggcagccaatcggtgggtcgttcctctttctactgcctggaatatttcccttctcaaatgctgagaacgggcaacaacttcaccttcagctacaccttcgaggacgttcccttccacagcagctacgcacacagccagagcctggaccggctgatgaatcctcttatcgaccagtacctgtattacctggccagaacacagagcaacgcaggaggcacagctggcaatcgggaactgcagttttatcagggcgggcctaccaccatggccgaacaagccaaaaactggctgcctggaccttgcttccggcaacgaagagtctccaagacgctggatcaaaacaacaacagcaactttgcttggactggtgccaccaaataccatctaaatggaagaaattcattggttaatcccggtgtcgccatggcaacccacaaggacgacgaggaacgcttcttcccttcgagcggagtcctgatttttggaaaaactggagcagctaataagactacactggaaaatgtgttaatgacaaatgaagaggaaattcgtcctaccaacccggtagccaccgaggaatacgggactgttagcagcaacctgcaggcggctaacactgcagcccagacacaagttgtcaacaaccagggagccttacctggtatggtctggcagaaccgggacgtgtacctgcagggtcccatctgggccaagattcctcacacggacggcaactttcacccgtctccgctgatgggcggctttggactgaagcatccgcctcctcagatcctgatcaaaaacactcctgttcctgctaatcccccggaggtgtttacgcctgccaagtttgcttctttcatcacacagtacagcaccggccaggtcagcgtggagatcgagtgggagctgcagaaggagaacagcaagcgctggaacccagagattcagtatacctccaattttgacaaacagactggtgtggactttgccgttgacagccagggtgtttattctgagcctcgccccattggtactcgttacctcacccgtaatctgtaa

SEQ ID NO: 479 - protein, 737 aa, Artificial Sequence
  source: /note="Description of Artificial Sequence: Synthetic polypeptide"
MAADGYLPDWLEDNLSEGIREWWDLKPGAPKPKANQQKQDDGRGLVLPGYKYLGPFNGLDKGEPVNAADAAALEHDKAYDQQLKAGDNPYLRYNHADAEFQERLQEDTSFGGNLGRAVFQAKKRVLEPLGLVEEGAKTAPGKKRPVEPSPQRSPDSSTGIGKKGQQPARKRLNFGQTGDSESVPDPQPIGEPPAAPSSVGSGTMAAGGGAPMADNNEGADGVGSSSGNWHCDSTRLGDRVITTSTRTWALPTYNNHLYKQISSQSAGSTNDNVYFGYSTPWGYFDFNRFHCHFSPRDWQRLINNNWGFRPKKLNFKLFNIQVKEVTTNDGVTTIANNLTSTVQVFSDSEYQLPYVLGSAHQGCLPPFPADVFMIPQYGYLTLNNGSQSVGRSSFYCLEYFPSQMLRTGNNFTFSYTFEDVPFHSSYAHSQSLDRLMNPLIDQYLYYLARTQSNAGGTAGNRELQFYQGGPTTMAEQAKNWLPGPCFRQRRVSKTLDQNNNSNFAWTGATKYHLNGRNSLVNPGVAMATHKDDEERFFPSSGVLIFGKTGAANKTTLENVLMTNEEEIRPTNPVATEEYGTVSSNLQAANTAAQTQVVNNQGALPGMVWQNRDVYLQGPIWAKIPHTDGNFHPSPLMGGFGLKHPPPQILIKNTPVPANPPEVFTPAKFASFITQYSTGQVSVEIEWELQKENSKRWNPEIQYTSNFDKQTGVDFAVDSQGVYSEPRPIGTRYLTRNL

SEQ ID NO: 480 - DNA, 2208 bp, Artificial Sequence
  source: /note="Description of Artificial Sequence: Synthetic polynucleotide"
atggctgccgatggttatcttccagattggctcgaggacactctctctgaaggaataagacagtggtggaagctcaaacctggcccaccaccaccaaagcccgcagagcggcataaggacgacagcaggggtcttgtgcttcctgggtacaagtacctcggacccttcaacggactcgacaagggggagccggtcaacgaggcagacgccgcggccctcgagcacgacaaggcctacgaccggcagctcgacagcggagacaacccgtacctcaagtacaaccacgccgacgcggagtttcaggagcgtcttaaagaagatacgtcttttgggggcaacctcggacgagcagtcttccaggcgaaaaagagggttcttgaacctctgggcctggttgaggaacctgttaagacggctccgggaaaaaagaggccggtagagcactctcctgcggagccagactcctcctcgggaaccggaaaagcgggccagcagcctgcaagaaaaagattgaattttggtcagactggagacgcagactccgtacctgacccccagcctctcggacagccaccagcagccccctctggtttgggatctactacaatggctacaggcagtggcgcaccaatggcagacaataacgagggtgccgatggagtgggtaattcttcaggaaattggcattgcgattcccaatggctgggcgacagagtcatcaccaccagcacccgaacctgggcccagcccacctacaacaaccacctctacaagcaaatctcaagccaatcaggagcctcaaacgacaaccactactttggctacagcaccccttgggggtattttgacttcaacagattccactgccacttttcaccacgtgactggcaaagactcatcaacaacaactggggattccgacccaagagactcaacttcaagctctttaacattcaagtcaaagaggtcacgcagaatgacggtacgacgacgattgccaataaccttaccagcacggttcaggtgtttactgactcggagtaccagctcccgtacgtcctcgggtcggcgcatcaaggatgcctcccgccgtttccagcggacgtcttcatggtcccacagtatggatacctcaccctgaacaacgggagtcaggcggtaggacgctcttccttttactgcctggagtactttccttctcagatgcttcgtactggaaacaactttcagttcagctacacctttgaagacgttcctttccacagcagctacgctcacagccagagtctggatcggctgatgaatcctctgatcgaccagtacctgtattatctgaacaaaacacaatcaaatagtggagctcttcagcagtctcggctactgtttagtcaagctggacccaccagcatgtctcttcaagctaaaaactggctacctggaccttgctacagacagcagcgtctgtcaaagcaggcaaacgacaacaacaacagcaactttccctggactgcggctacaaagtaccacctaaatggccgggactcgttggttaatccaggaccagctatggccagtcacaaagacgatgaagaaaagtttttccccatgcatggaaccctgatatttggtaaacaaggaacaaatgctaacgacgcggatttggacaatgtcatgattacagatgaagaagaaatccgcaccaccaatcccgtggctacggagcagtacggatatgtgtcaaataatttgcaaaactcaaatactggtccaactactggaactgtcaatcaccgaggagcgttacctggcatggtgtggcaggatcgagacgtgtacctgcagggacccatttgggccaagattcctcacaccgatggacactttcatccttctccactgatgggaggttttgggctcaaacacccgcctcctcagatcatgatcaaaaacactcccgttccagccaatcctcccacaaacttcagttctgccaagtttgcttctttcatcacacagtattccacggggcaggtcagcgtggagatcgagtgggagctgcagaaagagaacagcaaacgctggaatcccgaaattcagtacacttccaactacaacaaatctgttaatgtggactttactgtggacactaatggcgtgtattcagagcctcgccccattggcaccagatacctgactcgtaatctgtaa

SEQ ID NO: 481 - protein, 735 aa, Artificial Sequence
  source: /note="Description of Artificial Sequence: Synthetic polypeptide"
MAADGYLPDWLEDTLSEGIRQWWKLKPGPPPPKPAERHKDDSRGLVLPGYKYLGPFNGLDKGEPVNEADAAALEHDKAYDRQLDSGDNPYLKYNHADAEFQERLKEDTSFGGNLGRAVFQAKKRVLEPLGLVEEPVKTAPGKKRPVEHSPAEPDSSSGTGKAGQQPARKRLNFGQTGDADSVPDPQPLGQPPAAPSGLGSTTMATGSGAPMADNNEGADGVGNSSGNWHCDSQWLGDRVITTSTRTWAQPTYNNHLYKQISSQSGASNDNHYFGYSTPWGYFDFNRFHCHFSPRDWQRLINNNWGFRPKRLNFKLFNIQVKEVTQNDGTTTIANNLTSTVQVFTDSEYQLPYVLGSAHQGCLPPFPADVFMVPQYGYLTLNNGSQAVGRSSFYCLEYFPSQMLRTGNNFQFSYTFEDVPFHSSYAHSQSLDRLMNPLIDQYLYYLNKTQSNSGALQQSRLLFSQAGPTSMSLQAKNWLPGPCYRQQRLSKQANDNNNSNFPWTAATKYHLNGRDSLVNPGPAMASHKDDEEKFFPMHGTLIFGKQGTNANDADLDNVMITDEEEIRTTNPVATEQYGYVSNNLQNSNTGPTTGTVNHRGALPGMVWQDRDVYLQGPIWAKIPHTDGHFHPSPLMGGFGLKHPPPQIMIKNTPVPANPPTNFSSAKFASFITQYSTGQVSVEIEWELQKENSKRWNPEIQYTSNYNKSVNVDFTVDTNGVYSEPRPIGTRYLTRNL

SEQ ID NO: 482 - DNA, 2217 bp, Artificial Sequence
  source: /note="Description of Artificial Sequence: Synthetic polynucleotide"
atggctgccgatggttatcttccagattggctcgaggacaacctctctgagggcattcgcgagtggtgggcgctgaaacctggagccccgaagcccaaagccaaccagcaaaagcaggacgacggccggggtctggtgcttcctggctacaagtacctcggacccttcaacggactcgacaagggggagcccgtcaacgcggcggacgcagcggccctcgagcacgacaaggcctacgaccagcagctgcaggcgggtgacaatccgtacctgcggtataatcacgccgacgccgagtttcaggagcgtctgcaagaagatacgtcttttgggggcaacctcgggcgagcagtcttccaggccaagaagcgggttctcgaacctctcggtctggttgaggaaggcgctaagacggctcctggaaagaagagaccggtagagccgtcaccacagcgttcccccgactcctccacgggcatcggcaagaaaggccagcagcccgccagaaagagactcaatttcggtcagactggcgactcagagtcagtccccgaccctcaacctatcggagaacctccagcagcgccctctagtgtgggatctggtacaatggctgcaggcggtggcgcgccaatggcagacaataacgaaggtgccgacggagtgggtagttcctcgggaaattggcattgcgattccacatggctgggcgacagagtcatcaccaccagcacccgaacctgggccctgcccacctacaacaaccacctctacaagcaaacctccaacgggacctcgggaggcagcaccaacgacaacacctactttggctacagcaccccctgggggtattttgactttaacagattccactgccacttctcaccacgtgactggcagcgactcatcaacaacaactggggattccggcccaagagactcagcttcaagctcttcaacatccaggtcaaagaggtcacgcagaatgaaggcaccaagaccatcgccaataacctcaccagcaccatccaggtgtttacggactcggaataccagctgccgtacgtcctcggctctgcccaccagggctgcctgcctccgttcccggcggacgtcttcatgattcctcagtacggctacctgactctcaacaacggtagtcaggccgtgggacgttcctccttctactgcctggagtacttcccctctcagatgctgagaacgggcaacaacttttccttcagctacactttcgaggacgtgcctttccacagcagctacgcgcacagccagagtttggacaggctgatgaatcctctcatcgaccagtacctgtactacctgtcaagaacccagtctacgggaggcacagcgggaacccagcagttgctgttttctcaggccgggcctagcaacatgtcggctcaggccagaaactggctgcctggaccctgctacagacagcagcgcgtctccacgacactgtcgcaaaacaacaacagcaactttgcctggactggtgccaccaagtatcatctgaacggcagagactctctggtgaatccgggcgtcgccatggcaaccaacaaggacgacgaggaccgcttcttcccatccagcggcatcctcatgtttggcaagcagggagctggaaaagacaacgtggactatagcaacgtgatgctaaccagcgaggaagaaatcaagaccaccaaccccgtggccacagaacagtatggcgtggtggctgataacctacagcagcaaaacaccgctcctattgtgggggccgtcaacagccagggagccttacctggcatggtctggcagaaccgggacgtgtacctgcagggtcctatttgggccaagattcctcacacagatggcaactttcacccgtctcctttaatgggcggctttggacttaaacatccgcctcctcagatcctcatcaaaaacactcctgttcctgcggatcctccaacagcgttcaaccaggccaagctgaattctttcatcacgcagtacagcaccggacaagtcagcgcggagatcgagtgggagctgcagaaggagaacagcaagcgctggaacccagagattcagtatacttccaactactacaaatctacaaatgtggactttgctgttaatactgagggtgtttactctgagcctcgccccattggcactcgttacctcacccgtaatctgtaa

SEQ ID NO: 483 - protein, 738 aa, Artificial Sequence
  source: /note="Description of Artificial Sequence: Synthetic polypeptide"
MAADGYLPDWLEDNLSEGIREWWALKPGAPKPKANQQKQDDGRGLVLPGYKYLGPFNGLDKGEPVNAADAAALEHDKAYDQQLQAGDNPYLRYNHADAEFQERLQEDTSFGGNLGRAVFQAKKRVLEPLGLVEEGAKTAPGKKRPVEPSPQRSPDSSTGIGKKGQQPARKRLNFGQTGDSESVPDPQPIGEPPAAPSSVGSGTMAAGGGAPMADNNEGADGVGSSSGNWHCDSTWLGDRVITTSTRTWALPTYNNHLYKQTSNGTSGGSTNDNTYFGYSTPWGYFDFNRFHCHFSPRDWQRLINNNWGFRPKRLSFKLFNIQVKEVTQNEGTKTIANNLTSTIQVFTDSEYQLPYVLGSAHQGCLPPFPADVFMIPQYGYLTLNNGSQAVGRSSFYCLEYFPSQMLRTGNNFSFSYTFEDVPFHSSYAHSQSLDRLMNPLIDQYLYYLSRTQSTGGTAGTQQLLFSQAGPSNMSAQARNWLPGPCYRQQRVSTTLSQNNNSNFAWTGATKYHLNGRDSLVNPGVAMATNKDDEDRFFPSSGILMFGKQGAGKDNVDYSNVMLTSEEEIKTTNPVATEQYGVVADNLQQQNTAPIVGAVNSQGALPGMVWQNRDVYLQGPIWAKIPHTDGNFHPSPLMGGFGLKHPPPQILIKNTPVPADPPTAFNQAKLNSFITQYSTGQVSAEIEWELQKENSKRWNPEIQYTSNYYKSTNVDFAVNTEGVYSEPRPIGTRYLTRNL

SEQ ID NO: 484 - DNA, 2217 bp, Artificial Sequence
  source: /note="Description of Artificial Sequence: Synthetic polynucleotide"
atggctgctgacggttatcttccagattggctcgaggacaacctctctgagggcattcgcgagtggtgggacctgaaacctggagcccccaagcccaaggccaaccagcagaagcaggacgacggccggggtctggtgcttcctggctacaagtacctcggacccttcaacggactcgacaagggggagcccgtcaacgcggcggacgcagcggccctcgagcacgacaaggcctacgaccagcagctcaaagcgggtgacaatccgtacctgcggtataatcacgccgacgccgagtttcaggagcgtctgcaagaagatacgtcttttgggggcaacctcgggcgagcagtcttccaggccaagaagcgggttctcgaacctctcggtctggttgaggaagctgctaagacggctcctggaaagaagagaccggtagaaccgtcacctcagcgttcccccgactcctccacgggcatcggcaagaaaggccagcagcccgctagaaagagactgaactttgggcagactggcgactcagagtcagtccccgaccctcaaccaatcggagaacctccagcagcgccctctagtgtgggatctggtacaatggccgcaggcggtggcgcaccaatggcagacaataacgaaggtgccgacggagtgggtagttcctcgggaaattggcattgcgattccacatggctgggcgacagagtcatcaccaccagcacccgaacctgggccctgcccacctacaacaaccacctctacaagcaaatctccaacgggacctcgggaggcagcaccaacgacaacacctactttggctacagcaccccctgggggtattttgactttaacagattccactgccacttctcaccacgtgactggcagcgactcatcaacaacaactggggattccggcccaagagactcagcttcaagctcttcaacatccaggtcaaagaggtcacgcagaatgaaggcaccaagaccatcgccaataacctcaccagcaccatccaggtgtttacggactcggaataccagctgccgtacgtcctcggctctgcccaccagggctgcctgcctccgttcccggcggacgtcttcatgattcctcagtacggctacctgactctcaacaacggtagtcaggccgtgggacgttcctccttctactgcctggagtacttcccctctcagatgctgagaacgggcaacaacttttccttcagctacactttcgaggacgtgcctttccacagcagctacgcgcacagccagagtttggacaggctgatgaatcctctcatcgaccagtacctgtactacctgtcaagaacccagtctacgggaggcacagcgggaacccagcagctgctgttttctcaggccgggcctagcaacatgtcggctcaggccagaaactggctgcctggaccctgctacagacagcagcgcgtctccacgacactgtcgcaaaacaacaacagcaactttgcctggactggtgccaccaagtatcatctgaacggcagagactctctggtgaatccgggcgtcgccatggcaaccaacaaggacgacgaggaccgcttcttcccatccagcggcatcctcatgtttggcaagcagggagctggaaaagacaacgtggactatagcaacgtgatgctaaccagcgaggaagaaatcaagaccaccaaccccgtggccacagaacagtatggcgtggtggctgataacctacagcagcaaaacaccgctcctattgtgggggccgtcaacagccagggagccttacctggcatggtctggcagaaccgggacgtgtacctgcagggtcctatttgggccaagattcctcacacagatggcaactttcacccgtctcctttaatgggcggctttggacttaaacatccgcctcctcagatcctcatcaaaagcactcctgttcctgcggatcctccaacagcgttcaaccaggccaagctgaattctttcatcacgcagtacagcaccggacaagtcagcgtggagatcgagtgggagctgcagaaggagaacagcaagtgctggaacccagagattcagtatacttccaactactacaaatctacaaatgtggactttgctgttaatactgagggtgtttactctgagcctcgccccattggcactcgttacctcacccgtaatctgtaa

SEQ ID NO: 485 - protein, 738 aa, Artificial Sequence
  source: /note="Description of Artificial Sequence: Synthetic polypeptide"
MAADGYLPDWLEDNLSEGIREWWDLKPGAPKPKANQQKQDDGRGLVLPGYKYLGPFNGLDKGEPVNAADAAALEHDKAYDQQLKAGDNPYLRYNHADAEFQERLQEDTSFGGNLGRAVFQAKKRVLEPLGLVEEAAKTAPGKKRPVEPSPQRSPDSSTGIGKKGQQPARKRLNFGQTGDSESVPDPQPIGEPPAAPSSVGSGTMAAGGGAPMADNNEGADGVGSSSGNWHCDSTWLGDRVITTSTRTWALPTYNNHLYKQISNGTSGGSTNDNTYFGYSTPWGYFDFNRFHCHFSPRDWQRLINNNWGFRPKRLSFKLFNIQVKEVTQNEGTKTIANNLTSTIQVFTDSEYQLPYVLGSAHQGCLPPFPADVFMIPQYGYLTLNNGSQAVGRSSFYCLEYFPSQMLRTGNNFSFSYTFEDVPFHSSYAHSQSLDRLMNPLIDQYLYYLSRTQSTGGTAGTQQLLFSQAGPSNMSAQARNWLPGPCYRQQRVSTTLSQNNNSNFAWTGATKYHLNGRDSLVNPGVAMATNKDDEDRFFPSSGILMFGKQGAGKDNVDYSNVMLTSEEEIKTTNPVATEQYGVVADNLQQQNTAPIVGAVNSQGALPGMVWQNRDVYLQGPIWAKIPHTDGNFHPSPLMGGFGLKHPPPQILIKSTPVPADPPTAFNQAKLNSFITQYSTGQVSVEIEWELQKENSKCWNPEIQYTSNYYKSTNVDFAVNTEGVYSEPRPIGTRYLTRNL

SEQ ID NO: 486 - protein, 738 aa, Artificial Sequence
  source: /note="Description of Artificial Sequence: Synthetic polypeptide"
MAADGYLPDWLEDNLSEGIREWWDLKPGAPKPKANQQKQDDGRGLVLPGYKYLGPFNGLDKGEPVNAADAAALEHDKAYDQQLKAGDNPYLRYNHADAEFQERLQEDTSFGGNLGRAVFQAKKRVLEPLGLVEEAAKTAPGKKRPVEPSPQRSPDSSTGIGKKGQQPARKRLNFGQTGDSESVPDPQPIGEPPAAPSSVGSGTMAAGGGAPMADNNEGADGVGSSSGNWHCDSTWLGDRVITTSTRTWALPTYNNHLYKQISNGTSGGSTNDNTYFGYSTPWGYFDFNRFHCHFSPRDWQRLINNNWGFRPKRLSFKLFNIQVKEVTQNEGTKTIANNLTSTIQVFTDSEYQLPYVLGSAHQGCLPPFPADVFMIPQYGYLTLNNGSQAVGRSSFYCLEYFPSQMLRTGNNFSFSYTFEDVPFHSSYAHSQSLDRLMNPLIDQYLYYLSRTQSTGGTAGTQQLLFSQAGPSNMSAQARNWLPGPCYRQQRVSTTLSQNNNSNFAWTGATKYHLNGRDSLVNPGVAMATNKDDEDRFFPSSGILMFGKQGAGKDNVDYSNVMLTSEEEIKTTNPVATEQYGVVADNLQQQNTAPIVGAVNSQGALPGMVWQNRDVYLQGPIWAKIPHTDGNFHPSPLMGGFGLKHPPPQILIKSTPVPADPPTAFNQAKLNSFITQYSTGQVSVEIEWELQKENSKRWNPEIQYTSNYYKSTNVDFAVNTEGVYSEPRPIGTRYLTRNL

SEQ ID NO: 487 - DNA, 2217 bp, Artificial Sequence
  source: /note="Description of Artificial Sequence: Synthetic polynucleotide"
atggctgctgacggttatcttccagattggctcgaggacaacctctctgagggcattcgcgagtggtgggacctgaaacctggagcccccaagcccaaggccaaccagcagaagcaggacgacggccggggtctggtgcttcctggctacaagtacctcggacccttcaacggactcgacaagggggagcccgtcaacgcggcggacgcagcggccctcgagcacgacaaggcctacgaccagcagctcaaagcgggtgacaatccgtacctgcggtataaccacgccgacgccgagtttcaggagcgtctgcaagaagatacgtcttttgggggcaacctcgggcgagcagtcttccaggccaagaagcgggttctcgaacctctcggtctggttgaggaagctgctaagacggctcctggaaagaagagaccggtagaaccgtcacctcagcgttcccccgactcctccacgggcatcggcaagaaaggccagcagcccgctagaaagagactgaactttgggcagactggcgactcagagtcagtccccgaccctcaaccaatcggagaaccaccagcaggcccctctggtctgggatctggtacaatggctgcaggcggtggcgcaccaatggctgacaataacgagggcgccgacggagtgggtaatgcctcaggaaattggcattgcgattccacatggctgggcgacagagtcatcaccaccagcacccgaacctgggctttgcccacctacaacaaccacctctacaagcaaatctccagtcagtcagcaggtagcaccaacgacaacgtctacttcggctacagcaccccctgggggtattttgacttcaacagattccactgtcacttctcaccacgtgactggcagcggctcatcaacaacaactggggattccggcccaagaagctcaacttcaagctgttcaacatccaggtcaaggaggtcacaacgaatgacggcgtcacgaccatcgccaataaccctaccagcacggttcaggtcttttcggactcggaataccagctgccctacgtcctcggctccgcacaccagggctgcctgcctccgttcccggcggacgtcttcatgattccccagtacggctacctgactctgaacaatggcagccaatcggtgggtcgttcctctttctactgcctggaatatttcccttctcaaatgctgagaacgggcaacaacttcaccttcagctacaccttcgaggacgttcccttccacagcagctacgcacacagccagagcctggaccggctgatgaatcctcttatcgaccagtacctgtattacctggccagaacacagagcaacgcaggaggcacagctggcaatcgggaactgcagttttatcagggcgggcctaccaccatggccgaacaagccaaaaactggctgcctggaccctgctacagacagcagcgcgtctccacgacactgtcgcaaaacaacaacagcaactttgcctggactggtgccaccaagtatcatctgaacggcagagactctctggtgaatccgggcgtcgccatggcaaccaacaaggacgacgaggaccgcttcttcccatccagcggcatcctcatgtttggcaagcagggagctggaaaagacaacgtggactatagcaacgtgatgctaaccagcgaggaagaaatcaagaccaccaaccccgtggccacagaacagtatggcgtggtggctgataacctacagcagcaaaacaccgctcctattgtgggggccgtcaacagccagggagccttacctggcatggtctggcagaaccgggacgtgtacctgcagggtcctatttgggccaagattcctcacacagatggcaactttcacccgtctcctttaatgggcggctttggacttaaacatccgcctcctcagatcctcatcaaaaacactcctgttcctgcggatcctccaacagcgttcaaccaggccaagctgaattctttcatcacgcagtacagcaccggacaagtcagcgtggagatcgagtgggagctgcagaaggagaacagcaagcgctggaacccagagattcagtatacttccaactactacaaatctacaaatgtggactttgctgttaatactgagggtgtttactctgagcctcgccccattggcactcgttacctcacccgtaatctgtaa

SEQ ID NO: 488 - protein, 738 aa, Artificial Sequence
  source: /note="Description of Artificial Sequence: Synthetic polypeptide"
MAADGYLPDWLEDNLSEGIREWWDLKPGAPKPKANQQKQDDGRGLVLPGYKYLGPFNGLDKGEPVNAADAAALEHDKAYDQQLKAGDNPYLRYNHADAEFQERLQEDTSFGGNLGRAVFQAKKRVLEPLGLVEEAAKTAPGKKRPVEPSPQRSPDSSTGIGKKGQQPARKRLNFGQTGDSESVPDPQPIGEPPAGPSGLGSGTMAAGGGAPMADNNEGADGVGNASGNWHCDSTWLGDRVITTSTRTWALPTYNNHLYKQISSQSAGSTNDNVYFGYSTPWGYFDFNRFHCHFSPRDWQRLINNNWGFRPKKLNFKLFNIQVKEVTTNDGVTTIANNPTSTVQVFSDSEYQLPYVLGSAHQGCLPPFPADVFMIPQYGYLTLNNGSQSVGRSSFYCLEYFPSQMLRTGNNFTFSYTFEDVPFHSSYAHSQSLDRLMNPLIDQYLYYLARTQSNAGGTAGNRELQFYQGGPTTMAEQAKNWLPGPCYRQQRVSTTLSQNNNSNFAWTGATKYHLNGRDSLVNPGVAMATNKDDEDRFFPSSGILMFGKQGAGKDNVDYSNVMLTSEEEIKTTNPVATEQYGVVADNLQQQNTAPIVGAVNSQGALPGMVWQNRDVYLQGPIWAKIPHTDGNFHPSPLMGGFGLKHPPPQILIKNTPVPADPPTAFNQAKLNSFITQYSTGQVSVEIEWELQKENSKRWNPEIQYTSNYYKSTNVDFAVNTEGVYSEPRPIGTRYLTRNL

SEQ ID NO: 489 - DNA, 2208 bp, Artificial Sequence
  source: /note="Description of Artificial Sequence: Synthetic polynucleotide"
atggctgccgatggttatcttccagattggctcgaggacaacctctctgagggcattcacgagtggtgggacccgaaacctggagccccgaaacccaaagccaaccagcaaaagcaggacgacggccggggtctggtgcttcctggctacaagtacctcggacccttcaacggactcgacaagggggagcccgtcaacgcggcggacgcagcggccctcgagcacgacaaggcctacgaccagcagctcaaagcgggtgacaatccgtacctgcggtataatcacgccgacgccgagtttcaggagcgtctgcaagaagatacgtcttttgggggcaacctcgggcgagcagtcttccaggccaagaagcgggttctcgaacctctcggtctggttgaggaaggcgctaagacggctcctggaaagaagagaccggtagagccgtcaccacagcgttcccccgactcctccacgggcatcggcaagaaaggccagcagcccgccagaaagagactcaatttcggtcagactggcgactcagagtcagtccccgaccctcaacctatcggagaacctccagcagcgccctctagtgtgggatctggtacaatggctgcaggcggtggcgcaccaatggcagacaataacgaaggtgccgacggagtgggtagttcctcgggaaattggcattgcgattccacatggctgggcgacagagtcatcaccaccagcacccgaacctgggccctgcccacccacaacaaccacctctacaagcaaatctccaacgggacctcgggaggcagcaccaacgacaacgtctacttcggctacagcaccccctgggggtattttgacttcaacagattccactgtcacttctcaccacgtgaccggcagcgactcatcaacaacaactggggattccggcccaagagactcagcttcaagctcttcaacatccaggtcaaagaggtcacgcagaatgaaggcaccaagaccatcgccaataacctcaccagcaccatccaggtgtttacggactcggaataccagctgccgtacgtcctcggctctgcccaccagggctgcctgcctccgttcccggcggacgtcttcatgattcctcagtacggctacctgactctcaacaacggtagtcaggccgtgggacgttcctccttctactgcctggagtacttcccctctcagatgctgagaacgggcaacaacttttccttcagctacactttcgaggacgtgcctttccacagcagctacgcgcacagccagagtttggacaggctgatgaatcctctcatcgaccagtacctgtactacctgtcaagaacccagtctacggaaggcacagcgggaacccagcagttgctgttttctcaggccgggcctagcaacatgtcggctcaggccagaaactggctgcctggaccctgctacagacagcagcgcgtctccacgacactgtcgcaaaacaacaacagcaactttgcctggactggtgccaccaagtatcatctgaacggcagagactctctggtgaatccgggcgtcgccatggcaacccacaaggacgacgaggaacgcttcttcccttcgagcggagtcctgatttttggaaaaactggagcagctaataagactacactggaaaatgtgttaatgacaaatgaagaggaaattcgtcctaccaacccggtagccaccgaggaatacgggactgttagcagcaacctgcaggcggctaacactgcagcccagacacaagttgtcaacaaccagggagccttacctggtatggtctggcagaaccgggacgtgtacctgcagggtcccatctgggccaagattcctcacacggacggcaactttcacccgtctccgctgatgggcggctttggactgaagcatcctcagatcctgatcaaaaacactcctgttcctgctaatcccccggaggtgtttacgcctgccaagtttgcttctttcatcacacagtacagcaccggccaggtcagcgtggagatcgagtgggagctgcagaaggagaacagcaagcgctggaacccagagattcagtatacctccaattttgacaaacagactggtgtggactttgccgttgacagccagggtgtttattctgagcctcgccccattggtactcgttacctcacccgtaatctgtaa

SEQ ID NO: 490 - protein, 735 aa, Artificial Sequence
  source: /note="Description of Artificial Sequence: Synthetic polypeptide"
MAADGYLPDWLEDNLSEGIHEWWDPKPGAPKPKANQQKQDDGRGLVLPGYKYLGPFNGLDKGEPVNAADAAALEHDKAYDQQLKAGDNPYLRYNHADAEFQERLQEDTSFGGNLGRAVFQAKKRVLEPLGLVEEGAKTAPGKKRPVEPSPQRSPDSSTGIGKKGQQPARKRLNFGQTGDSESVPDPQPIGEPPAAPSSVGSGTMAAGGGAPMADNNEGADGVGSSSGNWHCDSTWLGDRVITTSTRTWALPTHNNHLYKQISNGTSGGSTNDNVYFGYSTPWGYFDFNRFHCHFSPRDRQRLINNNWGFRPKRLSFKLFNIQVKEVTQNEGTKTIANNLTSTIQVFTDSEYQLPYVLGSAHQGCLPPFPADVFMIPQYGYLTLNNGSQAVGRSSFYCLEYFPSQMLRTGNNFSFSYTFEDVPFHSSYAHSQSLDRLMNPLIDQYLYYLSRTQSTEGTAGTQQLLFSQAGPSNMSAQARNWLPGPCYRQQRVSTTLSQNNNSNFAWTGATKYHLNGRDSLVNPGVAMATHKDDEERFFPSSGVLIFGKTGAANKTTLENVLMTNEEEIRPTNPVATEEYGTVSSNLQAANTAAQTQVVNNQGALPGMVWQNRDVYLQGPIWAKIPHTDGNFHPSPLMGGFGLKHPQILIKNTPVPANPPEVFTPAKFASFITQYSTGQVSVEIEWELQKENSKRWNPEIQYTSNFDKQTGVDFAVDSQGVYSEPRPIGTRYLTRNL

SEQ ID NO: 491 - protein, 738 aa, Artificial Sequence
  source: /note="Description of Artificial Sequence: Synthetic polypeptide"
MAADGYLPDWLEDNLSEGIREWWDLKPGAPKPKANQQKQDDGRGLVLPGYKYLGPFNGLDKGEPVNAADAAALEHDKAYDQQLKAGDNPYLRYNHADAEFQERLQEDTSFGGNLGRAVFQAKKRVLEPLGLVEEGAKTAPGKKRPVEPSPQRSPDSSTGIGKKGQQPARKRLNFGQTGDSESVPDPQPIGEPPAAPSSVGSGTMAAGGGAPMADNNEGADGVGSSSGNWHCDSTWLGDRVITTSTRTWALPTYNNHLYKQISNGTSGGSTNDNTYFGYSTPWGYFDFNRFHCHFSPRDWQRPINNNWGFRPKRLSFKLFNIQVKEVTQNEGTKTIANNLTSTIQVFTDSEYQLPYVLGSAHQGCLPPFPADVFMIPQYGYLTLNNGSQAVGRSSFYCLEYFPSQMLRTGNNFSFSYPFEDVPFHSSYAHSQSLDRLMNPLIDQYLYYLSRTQSTGGTAGTQQLLFSQAGPSNMSAQARNWLPGPCYRQQRVSTTLSQNNNSNFAWTGATKYHLNGRDSLVNPGVAMATNKDDEDRFFPSSGILMFGKQGAGKDNVDYSNVMLTSEEEIKTTNPVATEQYGVVADNLQQQDTAPIVGAVNSQGALPGMVWQNRDVYLQGPIWAKIPHTDGNFHPSPLMGGFGLKHPPPQVLIKNTPVPADPPTAFNQAKLNSFITQYSTGQVSVEIEWELQKENSKRWNPEIQYTSNYYKSTNVDFAVNTEGVYSEPRPIGTRYLTRNL

SEQ ID NO: 492 - DNA, 2217 bp, Artificial Sequence
  source: /note="Description of Artificial Sequence: Synthetic polynucleotide"
atggctgccgatggttatcttccagattggctcgaggacaacctctctgagggcattcgcgagtggtgggacctgaaacctggagccccgaaacccaaggccaaccagcaaaagcaggacgacggccggggtctggtgcttcctggctacaagtacctcggacccttcaacggactcgacaagggggagcccgtcaacgcggcggacgcagcggccctcgagcacgacaaggcctacgaccagcagctcaaagcgggtgacaatccgtacctgcggtataatcacgccgacgccgagtttcaggagcgtctgcaagaagatacgtcttttgggggcaacctcgggcgagcagtcttccaggccaagaagcgggttctcgaacctctcggtctggttgaggaaggcgctaagacggctcctggaaagaagagaccggtagagccgtcaccacagcgttcccccgactcctccacgggcatcggcaagaaaggccagcagcccgccagaaagagactcaatttcggtcagactggcgactcagagtcagtccccgaccctcaacctatcggagaacctccagcagcgccctctagtgtgggatctggtacaatggctgcaggcggtggcgcaccaatggcagacaataacgaaggtgccgacggagtgggtagttcctcgggaaattggcattgcgattccacatggctgggcgacagagtcatcaccaccagcacccgaacctgggccctgcccacctacaacaaccacctctacaagcaaatctccaacgggacctcgggaggcagcaccaacgacaacacctactttggctacagcaccccctgggggtattttgactttaacagattccactgccacttctcaccacgtgactggcagcgacccatcaacaacaactggggattccggcccaagagactcagcttcaagctcttcaacatccaggtcaaagaggtcacgcagaatgaaggcaccaagaccatcgccaataacctcaccagcaccatccaggtgtttacggactcggaataccagctgccgtacgtcctcggctctgcccaccagggctgcctgcctccgttcccggcggacgtcttcatgattcctcagtacggctacctgactctcaacaacggtagtcaggccgtgggacgttcctccttctactgcctggagtacttcccctctcagatgctgagaacgggcaacaacttttccttcagctaccctttcgaggacgtgcctttccacagcagctacgcgcacagccagagtttggacaggctgatgaatcctctcatcgaccagtacctgtactacctgtcaagaacccagtctacgggaggcacagcgggaacccagcagttgctgttttctcaggccgggcctagcaacatgtcggctcaggccagaaactggctgcctggaccctgctacagacagcagcgcgtctccacgacactgtcgcaaaacaacaacagcaactttgcctggactggtgccaccaagtatcatctgaacggcagagactctctggtgaatccgggcgtcgccatggcaaccaacaaggacgacgaggaccgcttcttcccatccagcggcatcctcatgtttggcaagcagggagctggaaaagacaacgtggactatagcaacgtgatgctaaccagcgaggaagaaatcaagaccaccaaccccgtggccacagaacagtatggcgtggtggctgataacctacagcagcaagacaccgctcctattgtgggggccgtcaacagccagggagccttacctggcatggtctggcagaaccgggacgtgtacctgcagggtcctatttgggccaagattcctcacacagatggcaactttcacccgtctcctttaatgggcggctttggacttaaacatccgcctcctcaggtcctcatcaaaaacactcctgttcctgcggatcctccaacagcgttcaaccaggccaagctgaattctttcatcacgcagtacagcaccggacaagtcagcgtggagatcgagtgggagctgcagaaggagaacagcaagcgctggaacccagagattcagtatacttccaactactacaaatctacaaatgtggactttgctgttaatactgagggtgtttactctgagcctcgccccattggcactcgttacctcacccgtaatctgtaa

SEQ ID NO: 493 - DNA, 2214 bp, Artificial Sequence
  source: /note="Description of Artificial Sequence: Synthetic polynucleotide"
atggctgctgacggttatcttccagattggctcgaggacaacctctctgagggcattcgcgagtggtgggacctgaaacctggagcccccaagcccaaggccaaccagcagaagcaggacgacggccggggtctggtgcttcctggctacaagtacctcggacccttcaacggactcgacaagggggagcccgtcaacgcggcggacgcagcggccctcgagcacgacaaggcctacgaccagcagctcaaagcgggtgacaatccgtacctgcggtataaccacgccgacgccgagttccaggagcgtctgcaagaagatacgtcttttgggggcaacctcgggcgagcagtcttccaggccaagaagcgggttctcgaacctctcggtctggctgaggaagctgctaagacggctcctggaaagaagagaccggtagaaccgtcacctcagcgttcccccgactcctccacgggcatcggcaagaaaggccagcagcccgctagaaagagactgaactttgggcagactggcgactcagagtcagtccccgaccctcaaccaatcggagagccaccagcaggcccctctggtctgggatctggtacaatggctgcaggcggtggcgcaccaatggctgacaataacaagggcgccgacggagtgggtaatgcctcaggaaattggcattgcgattccacatggctgggcgacagagtcatcaccaccagcacccgaacctgggctttgcccacctacaacaaccacctctacaagcaaatctccagtcagtcagcaggtagcaccaacgacaacgtctacttcggctacagcaccccctgggggtattttgacttcaacagattccactgtcacttctcaccacgtgactggcagcggctcatcaacaacaactggggattccggcccaagaagctcaacttcaagctgttcaacatccaggtcaaggaggtcacaacgggtgacggcgtcacgaccatcgccaataaccttaccagcacggttcaggtcttttcggactcggaataccagctgccctacgtcctcggctccgcacaccagggctgcctgcctccgttcccggcggacgtcttcatgattccccagtacggctacctgactctgaacaatgacagccaatcggtgggtcgttcctctttctactgcctggaatatttcccttctcaaatgctgagaacgggcaacaacttcaccttcagctacaccttcgaggacgttcccttccacagcagctacgcacacagccagagcctggaccggctgatgaatcctcttatcgaccagtacctgtattacctggccagaacacagagcaacgcaggaggcacagctggcaatcgggaactgcagttttatcagggcgggcctaccaccatggccgaacaagccaaaaactggctgcctggaccttgcttccggcaacaaagagtctccaagacgctggatcaaaacaacaacagcaactttgcttggactggtgccaccaaataccatctaaatggaagaaattcattggttaatcccggtgtcgccatggcaacccacaaggacgacgaggaacgcttcttcccttcgagcggagtcctgatttttggaaaaactggagcagctaataagactacactggaaaatgtgttaatgacaaatgaagaggaaattcgtcctaccaacccggtagccaccgaggaatacgggactgttagcagcaacctgcaggcggctaacactgcagcccagacacaagttgtcaacaaccagggagccttacctggtatggtctggcagaaccgggacgtgtacctgcagggtcccatctgggccaagattcctcacacggacggcaactttcacccgtctccgctgatgggcggctttggactgaagcatccgcctcctcagatcctgatcaaaaacactcctgttcctgctaatcccccggaggtgtttacgcctgccaagtttgcttctttcatcacacagtacagcaccggccaggtcagcgtggagatcgagtgggagctgcagaaggagaacagcaagcgctggaacccagagattcagtatacctccaattttgacaaacagactggtgtggactttgccgttgacagccagggtgtttattctgagcctcgccccattggtactcgttacctcacccgtaatctgtaa

SEQ ID NO: 494 - protein, 737 aa, Artificial Sequence
  source: /note="Description of Artificial Sequence: Synthetic polypeptide"
MAADGYLPDWLEDNLSEGIREWWDLKPGAPKPKANQQKQDDGRGLVLPGYKYLGPFNGLDKGEPVNAADAAALEHDKAYDQQLKAGDNPYLRYNHADAEFQERLQEDTSFGGNLGRAVFQAKKRVLEPLGLAEEAAKTAPGKKRPVEPSPQRSPDSSTGIGKKGQQPARKRLNFGQTGDSESVPDPQPIGEPPAGPSGLGSGTMAAGGGAPMADNNKGADGVGNASGNWHCDSTWLGDRVITTSTRTWALPTYNNHLYKQISSQSAGSTNDNVYFGYSTPWGYFDFNRFHCHFSPRDWQRLINNNWGFRPKKLNFKLFNIQVKEVTTGDGVTTIANNLTSTVQVFSDSEYQLPYVLGSAHQGCLPPFPADVFMIPQYGYLTLNNDSQSVGRSSFYCLEYFPSQMLRTGNNFTFSYTFEDVPFHSSYAHSQSLDRLMNPLIDQYLYYLARTQSNAGGTAGNRELQFYQGGPTTMAEQAKNWLPGPCFRQQRVSKTLDQNNNSNFAWTGATKYHLNGRNSLVNPGVAMATHKDDEERFFPSSGVLIFGKTGAANKTTLENVLMTNEEEIRPTNPVATEEYGTVSSNLQAANTAAQTQVVNNQGALPGMVWQNRDVYLQGPIWAKIPHTDGNFHPSPLMGGFGLKHPPPQILIKNTPVPANPPEVFTPAKFASFITQYSTGQVSVEIEWELQKENSKRWNPEIQYTSNFDKQTGVDFAVDSQGVYSEPRPIGTRYLTRNL

SEQ ID NO: 495 - DNA, 2217 bp, Artificial Sequence
  source: /note="Description of Artificial Sequence: Synthetic polynucleotide"
atggctgccgatggttatcttccagattggctcgaggacaacctctctgagggcattcgcgagtggtgggacctgaaacctggagccccgaaacccaaagccaaccagcaaaagcaggacgacggccggggtctggtgcttcctggctacaagtacctcggacccttcaacggactcgacaagggggagcccgtcaacgcggcggacgcagcggccctcgagcacgacaaggcctacgaccagcagctcaaagcgggtgacaatccgtacctgcggtataatcacgccgacgccgagtttcaggagcgtctgcaagaagatacgtcttttgggggcaacctcgggcgagcagtcttccaggccaagaagcgggttctcgaacctctcggtctggttgaggaaggcgctaagacggctcctggaaagaagagaccggtagagccgtcaccacagcgttcccccgactcctccacgggcatcggcaagaaaggccagcagcccgccagaaagagactcaatttcggtcagactggcgactcagagtcagtccccgaccctcaacctatcggagaacctccagcagcgccctctagtgtgggatctggtacaatggctgcaggcggtggcgcaccaatggcagacaataacgaaggtgccgacggagtgggtagttcctcgggaaattggcattgcgattccacatggctgggcgacagagtcatcaccaccagcacccgaacctgggccctgcccacctacaacaaccacctctacaagcaaatctccaacgggacctcgggaggcagcaccaacgacaacacctactttggctacagcaccccctgggggtattttgactttaacagattccactgccacttctcaccacgtgactggcagcgactcatcaacaacaactggggattccggcccaagagactcagcttcaagctcttcaacatccaggtcaaagaggtcacgcagaatgaaggcaccaagaccatcgccaataacctcaccagcaccatccaggtgtttacggactcggaataccagctgccgtacgtcctcggctctgcccaccagggctgcctgcctccgttcccggcggacgtcttcatgattcctcagtacggctacctgactctcaacaacggtagtcaggccgtgggacgttcctccttctactgcctggagtacttcccctctcagatgctgagaacgggcaacaacttttccttcagctacactttcgaggacgtgcctttccacagcagctacgcgcacagccagagtttggacaggctgatgaatcctctcatcgaccagtacctgtactacctgtcaagaacccagtctacgggaggcacagcgggaacccagcagttgctgttttctcaggccgggcctagcaacatgtcggctcaggccagaaactggctgcctggaccctgctacagacagcagcgcgtctccacgacactgtcgcaaaacaacaacagcaactttgcctggactggtgccaccaagtatcatctgaacggcagagactctctggtgaatccgggcgtcgccatggcaaccaacaaggacgacgaggaccgcttcttcccatccagcggcatcctcatgtttggcaagcagggagctggaaaagacaacgtggactatagcaacgtgatgctaaccagcgaggaagaaatcaagaccaccaaccccgtggccacagaacagtatggcgtggtggctgataacctacagcagcaaaacaccgctcctattgtgggggccgtcaacagccagggagccttacctggcatggtctggcagaaccgggacgtgtacctgcagggtcctatttgggccaagattcctcacacagatggcaactttcacccgtctcctttaatgggcggctttggacttaaacatccgcctcctcagatcctcatcaaaaacactcctgttcctgcggatcctccaacagcgttcaaccaggccaagctgaattctttcatcacgcagtacagcaccggacaagtcagcgtggagatcgtgtgggagctgcagaaggagaacagcaagcgcaggaacccagagattcagtatacttccaactactacaaatctacaaatgtggactttgctgttaatactgagggtgtttactctgagcctcgccccattggcactcgttacctcacccgtaatctgtaa

SEQ ID NO: 496 - protein, 738 aa, Artificial Sequence
  source: /note="Description of Artificial Sequence: Synthetic polypeptide"
MAADGYLPDWLEDNLSEGIREWWDLKPGAPKPKANQQKQDDGRGLVLPGYKYLGPFNGLDKGEPVNAADAAALEHDKAYDQQLKAGDNPYLRYNHADAEFQERLQEDTSFGGNLGRAVFQAKKRVLEPLGLVEEGAKTAPGKKRPVEPSPQRSPDSSTGIGKKGQQPARKRLNFGQTGDSESVPDPQPIGEPPAAPSSVGSGTMAAGGGAPMADNNEGADGVGSSSGNWHCDSTWLGDRVITTSTRTWALPTYNNHLYKQISNGTSGGSTNDNTYFGYSTPWGYFDFNRFHCHFSPRDWQRLINNNWGFRPKRLSFKLFNIQVKEVTQNEGTKTIANNLTSTIQVFTDSEYQLPYVLGSAHQGCLPPFPADVFMIPQYGYLTLNNGSQAVGRSSFYCLEYFPSQMLRTGNNFSFSYTFEDVPFHSSYAHSQSLDRLMNPLIDQYLYYLSRTQSTGGTAGTQQLLFSQAGPSNMSAQARNWLPGPCYRQQRVSTTLSQNNNSNFAWTGATKYHLNGRDSLVNPGVAMATNKDDEDRFFPSSGILMFGKQGAGKDNVDYSNVMLTSEEEIKTTNPVATEQYGVVADNLQQQNTAPIVGAVNSQGALPGMVWQNRDVYLQGPIWAKIPHTDGNFHPSPLMGGFGLKHPPPQILIKNTPVPADPPTAFNQAKLNSFITQYSTGQVSVEIVWELQKENSKRRNPEIQYTSNYYKSTNVDFAVNTEGVYSEPRPIGTRYLTRNL

SEQ ID NO: 497 - protein, 738 aa, Artificial Sequence
  source: /note="Description of Artificial Sequence: Synthetic polypeptide"
MAADGYLPDWLEDNLSEGIREWWDLKPGAPKPKANQQKQDDGRGLVLPGYKYLGPFNGLDKGEPVNAADAAALEHDKAYDQQLKAGDNPYLRYNHADAEFQERLQEDTSFGGNLGRAVFQAKKRVLEPLGLVEEGAKTAPGKKRPVEPSPQRSPDSSTGIGKKGQQPARKRLNFGQTGDSESVPDPQPIGEPPAAPSSVGSGTMAAGGGAPMADNNEGADGVGSSSGNWHCDSTWLGDRVITTSTRTWALPTYNNHLYKQISNGTSGGSTNDNTYFGYSTPWGYFDFNRFHCHFSPRDWQRLINNNWGFRPKRLSFKLFNIQVKEVTQNEGTKTIANNLTSTIQVFTDSEYQLPYVLGSAHQGCLPPFPADVFMIPQYGYLTLNNGSQAVGRSSFYCLEYFPSQMLRTGNNFSFSYTFEDVPFHSSYAHSQSLDRLMNPLIDQYLYYLSRTQSTGGTAGTQQLLFSQAGPSNMSAQARNWLPGPCYRQQRVSTTLSQNNNSNFAWTGATKYHLNGRDSLVNPGVAMATNKDDEDRFFPSSGILMFGKQGAGKDNVDYSNVMLTSEEEIKTTNPVATEQYGVVADNLQQQNTAPIVGAVNSQGALPGMVWQNRDVYLQGPIWAKIPHTDGNFHPSPLMGGFGLKHPPPQILIKNTPVPADPPTAFNQAKLNSFITQYSTGQVSVEIEWELQKENSKRWNPEIQYTSNYYKSTNVDFAVNTEGVYSEPRPIGTRYLTRNL

SEQ ID NO: 498 - protein, 738 aa, Artificial Sequence
  source: /note="Description of Artificial Sequence: Synthetic polypeptide"
MAADGYLPDWLEDNLSEGIREWWDLKPGAPKPKANQQKQDDGRGLVLPGYKYLGPFNGLDKGEPVNAADAAALEHDKAYDQQLKAGDNPYLRYNHADAEFQERLQEDTSFGGNLGRAVFQAKKRVLEPLGLVEEGAKTAPGKKRPVEPSPQRSPDSSTGIGKKGQQPARKRLNFGQTGDSESVPDPQPIGEPPAAPSSVGSGTMAAGGGAPMADNNEGADGVGSSSGNWHCDSTWLGDRVITTSTRTWALPTYNNHLYKQISNGTSGGSTNDNTYFGYSTPWGYFDFNRFHCHFSPRDWQRLINNNWGFRPKRLSFKLFNIQVKEVTQNEGTKTIANNLTSTIQVFTDSEYQLPYVLGSAHQGCLPPFPADVFMIPQYGYLTLNNGSQAVGRSSFYCLEYFPSQMLRTGNNFSFSYTFEDVPFHSSYAHSQSLDRLMNPLIDQYLYYLSRTQSTGGTAGTQQLLFSQAGPSNMSAQARNWLPGPCYRQQRVSTTLSQNNNSNFAWTGATKYHLNGRDSLVNPGVAMATNKDDEDRFFPSSGILMFGKQGAGKDNVDYSNVMLTSEEEIKTTNPVATEQYGVVADNLQQQNTAPIVGAVNSQGALPGMVWQNRDVYLQGPIWAKIPHTDGNFHPSPLMGGFGLKHPPPQILIKNTPVPADPPTAFNQAKLNSFITQYSTGQVSVEIVWELQKENSKRWNPEIQYTSNYYKSTNVDFAVNTEGVYSEPRPIGTRYLTRNL

SEQ ID NO: 499 - protein, 738 aa, Artificial Sequence; identical to SEQ ID NO: 497
  source: /note="Description of Artificial Sequence: Synthetic polypeptide"

SEQ ID NO: 500 - DNA, 2214 bp, Artificial Sequence
  source: /note="Description of Artificial Sequence: Synthetic polynucleotide"
atggctgctgacggttatcttccagattggctcgaggacaacctctctgagggcattcgcgagtggtgggacctgaaacctggagcccccaagcccaaggccaaccagcagaagcaggacgacggccggggtctggtgcttcctggctacaagtacctcggacccttcaacggactcgacaagggggagcccgtcaacgcggcggacgcagcggccctcgagcacgacaaggcctacgaccagcagctcaaagcgggtgacaatccgtacctgcggtataaccacgccgacgccgagtttcaggagcgtctgcaagaagatacgtcttttgggggcaacctcgggcgagcagtcttccaggccaagaagcgggttctcgaacctctcggtctggttgaggaagctgctaagacggctcctggaaagaagagaccggtagaaccgtcacctcagcgttcccccgactcctccacgggcatcggcaagaaaggccagcagcccgctagaaagagactgaactttgggcagactggcgactcagagtcagtccccgaccctcaaccaatcggagaaccaccagcaggcccctctggtctgggatctggtacaatggctgcaggcggtggcgctccaatggcagacaataacgaaggcgccgacggagtgggtaatgcctcaggaaattggcattgcgattccacatggctgggcgacagagtcatcaccaccagcacccgaacctgggctttgcccacctacaacaaccacctctacaagcaaatctccagtcagtcagcaggtagcaccaacgacaacgtctacttcggctacagcaccccctgggggtattttgacttcaacagattccactgtcacttctcaccacgtgactggcagcggctcatcaacaacaactggggattccggcccaagaagctcaacttcaagctgttcaacatccaggtcaaggaggtcacaacgaatgacggcgtcacgaccatcgccaataaccttaccagcacggttcaggtcttttcggactcggaataccagctgccctacgtcctcggctccgcacaccagggctgcctgcctccgttcccggcggacgtcttcatgattccccagtacggctacctgactctgaacaatggcagccaatcggtgggtcgttcctctttctactgcctggaatatttcccttctcaaatgctgagaacgggcaacaacttcaccttcagctacaccttcgaggacgttcccttccacagcagctacgcacacagccagagcctggaccggctgatgaatcctcttatcgaccagtacctgtattacctggccagaacacagagcaacgcaggaggcacagctggcaatcgggaactgcagttttatcagggcgggcctaccaccatggccgaacaagccaaaaactggctgcctagaccttgcttccggcaacaaagagtctccaagacgctggatcaaaacaacaacagcaactttgcttggactggtgccaccaaataccatctaaatggaagaaattcattggttaatcccggtgtcgccatggcaacccacaaggacgacgaggaacgcttcttcccttcgagcggagtcctgatttttggaaaaactggagcagctaataagactacactggaaaatgtgttaatgacaaatgaagaggaaattcgtcctaccaacccggtagccaccgaggaatacgggactgttagcagcaacctgcaggcggctaacactgcagcccagacacaagttgtcaacaaccagggagccttacctggtatggtctggcagaaccgggacgtgtacctgcagggtcccatctgggccaagattcctcacacggacggcaactttcacccgtctccgctgatgggcggctttggactgaagcatccgcctcctcagatcctgatcaaaaacactcctgttcctgctaatcccccggaggtgtttacgcctgccaagtttgcttctttcatcacacagtacagcaccggccaggtcagcgtggagatcgagtgggagctgcagaaggagaacagcaagcgctggaacccagagattcagtatacctccaattttgacaaacagactggtgtggactttgccgttgacagccagggtgtttattctgagcctcgccccattggtactcgttacctcacccgtaatctgtaa

SEQ ID NO: 501 - protein, 737 aa, Artificial Sequence
  source: /note="Description of Artificial Sequence: Synthetic polypeptide"
MAADGYLPDWLEDNLSEGIREWWDLKPGAPKPKANQQKQDDGRGLVLPGYKYLGPFNGLDKGEPVNAADAAALEHDKAYDQQLKAGDNPYLRYNHADAEFQERLQEDTSFGGNLGRAVFQAKKRVLEPLGLVEEAAKTAPGKKRPVEPSPQRSPDSSTGIGKKGQQPARKRLNFGQTGDSESVPDPQPIGEPPAGPSGLGSGTMAAGGGAPMADNNEGADGVGNASGNWHCDSTWLGDRVITTSTRTWALPTYNNHLYKQISSQSAGSTNDNVYFGYSTPWGYFDFNRFHCHFSPRDWQRLINNNWGFRPKKLNFKLFNIQVKEVTTNDGVTTIANNLTSTVQVFSDSEYQLPYVLGSAHQGCLPPFPADVFMIPQYGYLTLNNGSQSVGRSSFYCLEYFPSQMLRTGNNFTFSYTFEDVPFHSSYAHSQSLDRLMNPLIDQYLYYLARTQSNAGGTAGNRELQFYQGGPTTMAEQAKNWLPRPCFRQQRVSKTLDQNNNSNFAWTGATKYHLNGRNSLVNPGVAMATHKDDEERFFPSSGVLIFGKTGAANKTTLENVLMTNEEEIRPTNPVATEEYGTVSSNLQAANTAAQTQVVNNQGALPGMVWQNRDVYLQGPIWAKIPHTDGNFHPSPLMGGFGLKHPPPQILIKNTPVPANPPEVFTPAKFASFITQYSTGQVSVEIEWELQKENSKRWNPEIQYTSNFDKQTGVDFAVDSQGVYSEPRPIGTRYLTRNL

SEQ ID NO: 502 - DNA, 2214 bp, Artificial Sequence
  source: /note="Description of Artificial Sequence: Synthetic polynucleotide"
atggctgctgacggttatcttccagattggctcgaggacaacctctctgagggcattcgcgagtggtgggacctgaaacctggagcccccaagcccaaggccaaccagcagaagcaggacgacggccggggtctggtgcttcctggctacaagtacctcggacccttcaacggactcgacaagggggagcccgtcaacgcggcggacgcagcggccctcgagcacgacaaggcctacgaccagcagctcaaagcgggtgacaatccgtacctgcggtataaccatgccgacgccgagtttcaggagcgtctgcaagaagatacgtcttttgggggcaacctcgggcgagcagtcctccaggccaagaagcgggttctcgaacctctcggtctggttgaggaagctgctaagacggctcctggaaagaagagaccggtagaaccgtcacctcagcgttcccccgactcctccacgggcatcggcaagaaaggccagcagcccgctagaaagagactgaactttgggcagactggcgactcagagtcagtccccgaccctcaaccaatcggagaaccaccagcaggcccctctggtctgggatctggtacaatggctgcaggcggtggcgctccaatggcagacaataacgaaggcgccgacggagtgggtaatgcctcaggaaattggcattgcgattccacatggctgggcgacagagtcatcaccaccagcacccgaacctgggctttgcccacctacaacaaccacctctacaagcaaatctccagtcagtcagcaggtagcaccaacgacaacgtctacttcggctacagcaccccctgggggtattttgacttcaacagattccactgtcacttctcaccacgtgactggcagcggctcatcaacaacaactggggattccggcccaagaagctcaacttcaagctgttcaacatccaggtcaaggaggtcacaacgaatgacggcgtcacgaccatcgccaataaccttaccagcacggttcaggtcttttcggactcggaataccagctgccctacgtcctcggctccgcacaccagggctgcctgcctccgttcccggcggacgtcttcatgattccccagtacggctacctgactctgaacaatggcagccaatcggtgggtcgttcctctttctactgcctggaatatttcccttctcaaatgctgagaacgggcaacaacttcaccttcagctacaccttcgaggacgttcccttccacagcagctacgcacacagccagagcctggaccggctgatgaatcctcttatcgaccagtacctgtattacctggccagaacacagagcaacgcaggaggcacagctggcaatcgggaactgcagttttatcagggcgggcctaccaccatggccgaacaagccaaaaactggctgcctggaccttgcttccggcaacaaagagtctccaagacgctggatcaaaacaacaacagcaactttgcttggactggtgccaccaaataccatctaaatggaagaaattcattggttaatcccggtgtcgccatggcaacccacaaggacgacgaggaacgcttcttcccttcgagcggagtcctgatttttggaaaaactggagcagctaataagactacactggaaaatgtgttaatgacaaatgaagaggaaattcgtcctaccaacccggtagccaccgaggaatacgggactgttagcagcaacctgcaggcggctaacactgcagcccagacacaagttgtcaacaaccagggagccttacctggtatggtctggcagaaccgggacgtgtacctgcagggtcccatctgggccaagattcctcacacggacggcaactttcacccgtctccgctgatgggcggctttggactgaagcatccgcctcctcagatcctgatcaaaaacactcctgttcctgctaatcccccggaggtgtttacgcctgccaagtttgcttctttcatcacacagtacagcaccggccaggtcagcgtggagatcgagtgggagctgcagaaggagaacagcaagcgctggaacccagagattcagtatacctccaattttgacaaacagactggtgtggactttgccgttgacagccagggtgtttattctgagcctcgccccattggtactcgttacctcacccgtaatctgtaa

SEQ ID NO: 503 - protein, 737 aa, Artificial Sequence; identical to SEQ ID NO: 462
  source: /note="Description of Artificial Sequence: Synthetic polypeptide"

SEQ ID NO: 504 - protein, 737 aa, Artificial Sequence
  source: /note="Description of Artificial Sequence: Synthetic polypeptide"
MAADGYLPDWLEDNLSEGIREWWDLKPGAPKPKANQQKQDDGRGLVLPGYKYLGPFNGLDKGEPVNAADAAALEHDKAYDQQLKAGDNPYLRYNHADAEFQERLQEDTSFGGNLGRAVLQAKKRVLEPLGLVEEAAKTAPGKKRPVEPSPQRSPDSSTGIGKKGQQPARKRLNFGQTGDSESVPDPQPIGEPPAGPSGLGSGTMAAGGGAPMADNNEGADGVGNASGNWHCDSTWLGDRVITTSTRTWALPTYNNHLYKQISSQSAGSTNDNVYFGYSTPWGYFDFNRFHCHFSPRDWQRLINNNWGFRPKKLNFKLFNIQVKEVTTNDGVTTIANNLTSTVQVFSDSEYQLPYVLGSAHQGCLPPFPADVFMIPQYGYLTLNNGSQSVGRSSFYCLEYFPSQMLRTGNNFTFSYTFEDVPFHSSYAHSQSLDRLMNPLIDQYLYYLARTQSNAGGTAGNRELQFYQGGPTTMAEQAKNWLPGPCFRQQRVSKTLDQNNNSNFAWTGATKYHLNGRNSLVNPGVAMATHKDDEERFFPSSGVLIFGKTGAANKTTLENVLMTNEEEIRPTNPVATEEYGTVSSNLQAANTAAQTQVVNNQGALPGMVWQNRDVYLQGPIWAKIPHTDGNFHPSPLMGGFGLKHPPPQILIKNTPVPANPPEVFTPAKFASFITQYSTGQVSVEIEWELQKENSKRWNPEIQYTSNFDKQTGVDFAVDSQGVYSEPRPIGTRYLTRNL

SEQ ID NO: 505 - DNA, 2217 bp, Artificial Sequence
  source: /note="Description of Artificial Sequence: Synthetic polynucleotide"
atggctgccgatggttatcttccagattggctcgaggacaacctctctgagggcattcgcgagtggtgggacctgaaacctggagccccgaaacccaaagccaaccagcaaaagcaggacgacggccggggtctggtgcttcctggctacaagtacctcggacccttcaacggactcgacaagggggagcccgtcaacgcggcggacgcagcggccctcgagcacgacaaggcctacgaccagcagctcaaagcgggtgacaatccgtacctgcggtataatcacgccgacgccgagtttcaggagcgtctgcaagaagatacgtcttttgggggcaacctcgggcgagcagtcttccaggccaagaagcgggttctcgaacctctcggtctggttgaggaaggcgctaagacggctcctggaaagaagagaccggtagagccgtcaccacagcgttcccccgactcctccacgggcatcggcaagaaaggccagcagcccgccagaaagagactcaatttcggtcagactggcgactcagagtcagtccccgaccctcaacctatcggagaacctccagcagcgccctctagtgtgggatctggtacaatggctgcaggcggtggcgcaccaatggcagacaataacgaaggtgccgacggagtgggtagttcctcgggaaattggcattgcgattccacatggctgggcgacagagtcatcaccaccagcacccgaacctgggccctgcccacctacaacaaccacctctacaagcaaatctccaacgggacctcgggaggcagcaccaacgacaacacctactttggctacagcaccccctgggggtattttgactttaacagattccactgccacttctcaccacgtgactggcagcgactcatcaacaacaactggggattccggcccaagagactcagcttcaagctcttcaacatccaggtcaaagaggtcacgcagaatgaaggcaccaagaccatcgccaataacctcaccagcaccatccaggtgtttacggactcggaataccagctgccgtacgtcctcggctctgcccaccagggctgcctgcctccgttcccggcggacgtcttcatgattcctcagtacggctacctgactctcaacaacggtagtcaggccgtgggacgttcctccttctactgcctggagtacttcccctctcagatgctgagaacgggcaacaacttttccttcagctacactttcgaggacgtgcctttccacagcagctacgcgcacagccagagtttggacaggctgatgaatcctctcatcgaccagtacctgtactacctgtcaagaacccagtctacgggaggcacagcgggaacccagcagttgctgttttctcaggccgggcctagcaacatgtcggctcaggccagaaactggctgcctggaccctgctacagacagcagcgcgtctccacgacactgtcgcaaaacaacaacagcaactttgcctggactggtgccaccaagtatcatctgaacggcagagactctctggtgaatccgggcgtcgccatggcaaccaacaaggacgacgaggaccgcttcttcccacccagcggcatcctcatgtttggcaagcagggagctggaaaagacaacgtggactatagcaacgtgatgctaaccagcgaggaagaaatcaagaccaccaaccccgtggccacagaacagtatggcgtggtggctgataacctacagcagcaaaacaccgctcctattgtgggggccgtcaacagccagggagccttacctggcatggtctggcagaaccgggacgtgtacctgcagggtcctatttgggccaagattcctcacacagatggcaactttcacccgtctcctttaatgggcggctttggacttaaacatccgcctcctcagatcctcatcaaaaacactcctgttcctgcggatcctccaacagcgttcaaccaggccaagctgaattctttcatcacgcagtacagcaccggacaagtcagcgtggtgatcgagtgggagctgcagaaggagaacagcaagcgctggaacccagagattcagtatacttccaactactacaaatctacaaatgtggactttgctgttaatactgagggtgtttactctgagcttcgccccattggcactcgttacctcacccgtaatctgtaa

SEQ ID NO: 506 - protein, 738 aa, Artificial Sequence
  source: /note="Description of Artificial Sequence: Synthetic polypeptide"
MAADGYLPDWLEDNLSEGIREWWDLKPGAPKPKANQQKQDDGRGLVLPGYKYLGPFNGLDKGEPVNAADAAALEHDKAYDQQLKAGDNPYLRYNHADAEFQERLQEDTSFGGNLGRAVFQAKKRVLEPLGLVEEGAKTAPGKKRPVEPSPQRSPDSSTGIGKKGQQPARKRLNFGQTGDSESVPDPQPIGEPPAAPSSVGSGTMAAGGGAPMADNNEGADGVGSSSGNWHCDSTWLGDRVITTSTRTWALPTYNNHLYKQISNGTSGGSTNDNTYFGYSTPWGYFDFNRFHCHFSPRDWQRLINNNWGFRPKRLSFKLFNIQVKEVTQNEGTKTIANNLTSTIQVFTDSEYQLPYVLGSAHQGCLPPFPADVFMIPQYGYLTLNNGSQAVGRSSFYCLEYFPSQMLRTGNNFSFSYTFEDVPFHSSYAHSQSLDRLMNPLIDQYLYYLSRTQSTGGTAGTQQLLFSQAGPSNMSAQARNWLPGPCYRQQRVSTTLSQNNNSNFAWTGATKYHLNGRDSLVNPGVAMATNKDDEDRFFPPSGILMFGKQGAGKDNVDYSNVMLTSEEEIKTTNPVATEQYGVVADNLQQQNTAPIVGAVNSQGALPGMVWQNRDVYLQGPIWAKIPHTDGNFHPSPLMGGFGLKHPPPQILIKNTPVPADPPTAFNQAKLNSFITQYSTGQVSVVIEWELQKENSKRWNPEIQYTSNYYKSTNVDFAVNTEGVYSELRPIGTRYLTRNL

SEQ ID NO: 507 - DNA, 2214 bp, Artificial Sequence
  source: /note="Description of Artificial Sequence: Synthetic polynucleotide"
atggctgctgacggttatcttccagattggctcgaggacaacctctctgagggcattcgcgagtggtgggacctgaaacctggagcccccaagcccaaggccaaccagcagaagcaggacgacggccggggtctggtgcttcctggctacaagtacctcggacccttcaacggactcgacaagggggagcccgtcaacgcggcggacgcagcggccctcgagcacgacaaggcctacgaccagcagctcaaagcgggtgacaatccgtacctgcggtataaccacgccgacgccgagtttcaggagcgtctgcaagaagatacgtcttttgggggcaacctcgggcgagcagtcttccaggccaagaagcgggttctcgaacctctcggtctggttgaggaagctgctaagacggctcctggaaagaagagaccggtagaaccgtcacctcagcgttcccccgactcctccacgggcatcggcaagaaaggccagcagcccgctagaaagagactgaactttgggcagactggcgactcagagtcagtccccgaccctcaaccaatcggagaaccaccagcaggcccctctggtctgggatctggtacaatggctgcaggcggtggcgccccaatggcagacaataacgaaggcgccgacggagtgggtaatgcctcaggaaattggcattgcgattccacatggctgggcgacagagtcatcaccaccagcacccgaacctgggctttgcccacctacaacaaccacctctacaagcaaatctccagtcagtcagcaggtagcaccaacgacaacgtctacttcggctacagcaccccctgggggtattttgacttcaacagattccactgtcacttctcaccacgtgactggcagcggctcatcaacaacaactggggattccggcccaagaagctcaacttcaagctgttcaacatccaggtcaaggaggtcacaacgaatgacggcgtcacgaccatcgccaataaccttaccagcacggttcaggtcttttcggactcggaataccagctgccctacgtcctcggctccgcacaccagggctgcctgcctccgttcccggcggacgtcttcatgattccccagtacggctacctgactctgaacaatggcagccaatcggtgggtcgttcctctttctactgcctggaatatttcccttctcaaatgctgagaacgggcaacaacttcaccatcagctacaccttcgaggacgttcccttccacagcagctacgcacacagccagagcctggaccggctgatgaatcctcttatcgaccagtacctgtattacctggccagaacacagagcaacgcaggaggcacagctggcaatcaggaactgcagttttatcagggcgggcctaccaccatggccgaacaagccaaaaactggctgcctggaccttgcttccggcaacaaagagtctccaagacgctggatcaaaacaacaacagcaactttgcttggactggtgccaccaaataccatctaaatggaagaaattcattggttaatcccggtgtcgccatggcaacccacaaggacgacgaggaacgcttcttcccttcgagcggagtcctgatttttggaaaaactggagcagctaataagactacactggaaaatgtgttaatgacaaatgaagaggaaattcgtcctaccaacccggtagccaccgaggaatacgggactgttagcagcaacctgcaggcggctaacactgcagcccagacacaagttgtcaacaaccagggagccttacctggtatggtctggcagaaccgggacgtgtacctgcagggtcccatctgggccaagattcctcacacagatggcaactttcacccgtctcctttaatgggcggctttggacttaaacatccgcctcctcagatcctcatcaaaaacactcctgttcctgcggatcctccaacagcgttcaaccaggccaagctgaattctttcatcacgcagtacagcaccggacaagtcagcgtggagatcgagtgggagctgcagaaggagaacagcaagcgctggaacccagagattcagtatacttccaactactacaaatctacaaatgtggactttgctgttaatactgagggtgtttactctgagcctcgccccattggcactcgttacctcacccgtaatctgtaa

SEQ ID NO: 508 - protein, 737 aa, Artificial Sequence
  source: /note="Description of Artificial Sequence: Synthetic polypeptide"
MAADGYLPDWLEDNLSEGIREWWDLKPGAPKPKANQQKQDDGRGLVLPGYKYLGPFNGLDKGEPVNAADAAALEHDKAYDQQLKAGDNPYLRYNHADAEFQERLQEDTSFGGNLGRAVFQAKKRVLEPLGLVEEAAKTAPGKKRPVEPSPQRSPDSSTGIGKKGQQPARKRLNFGQTGDSESVPDPQPIGEPPAGPSGLGSGTMAAGGGAPMADNNEGADGVGNASGNWHCDSTWLGDRVITTSTRTWALPTYNNHLYKQISSQSAGSTNDNVYFGYSTPWGYFDFNRFHCHFSPRDWQRLINNNWGFRPKKLNFKLFNIQVKEVTTNDGVTTIANNLTSTVQVFSDSEYQLPYVLGSAHQGCLPPFPADVFMIPQYGYLTLNNGSQSVGRSSFYCLEYFPSQMLRTGNNFTISYTFEDVPFHSSYAHSQSLDRLMNPLIDQYLYYLARTQSNAGGTAGNQELQFYQGGPTTMAEQAKNWLPGPCFRQQRVSKTLDQNNNSNFAWTGATKYHLNGRNSLVNPGVAMATHKDDEERFFPSSGVLIFGKTGAANKTTLENVLMTNEEEIRPTNPVATEEYGTVSSNLQAANTAAQTQVVNNQGALPGMVWQNRDVYLQGPIWAKIPHTDGNFHPSPLMGGFGLKHPPPQILIKNTPVPADPPTAFNQAKLNSFITQYSTGQVSVEIEWELQKENSKRWNPEIQYTSNYYKSTNVDFAVNTEGVYSEPRPIGTRYLTRNL

SEQ ID NO: 509 - DNA, 2217 bp, Artificial Sequence
  source: /note="Description of Artificial Sequence: Synthetic polynucleotide"
atggctgccgatggttatcttccagattggctcgaggacaacctctctgagggcattcgcgagtggtgggacctgaaacctggagccccgaaacccaaagccaaccagcaaaagcaggacgacggccggggtctggtgcttcctggctacaagtacctcggacccttcaacggactcgacaagggggagcccgtcaacgcggcggacgcagcggccctcgagcacgacaaggcctacgaccagcagctcaaagcgggtgacaatccgtacctgcggtataatcacgccgacgccgagtttcaggagcgtctgcaagaagatacgtcttttgggggcaacctcgggcgagcagtcttccaggccaagaagcgggttctcgaacctctcggtctggttgaggaaggcgctaagacggctcctggaaagaagagaccggtagagccgtcaccacagcgttcccccgactcctccacgggcatcggcaagaaaggccagcagcccgccagaaagagactcaatttcggtcagactggcgactcagagtcagtccccgaccctcaacctatcggagaacctccagcagcgccctctagtgtgggatctggtacaatggctgcaggcggtggcgcaccaatggcagacaataacgaaggtgccgacggagtgggtagttcctcgggaaattggcattgcgattccacatggctgggcgacagagtcatcaccaccagcacccgaacctgggccctgcccgcctacaacaaccacctctacaagcaaatctccaacgggacctcgggaggcagcaccaacgacaacacctactttggctacagcaccccctgggggtattttgactttaacagattccactgccacttctcaccacgtgactggcagcgactcatcaacaacaactggggattccggcccaagagactcagcttcaagctcttcaacatccaggtcaaagaggtcacgcagaatgaaggcaccaagaccatcgccaataacctcaccagcaccatccaggtgtttacggactcggaataccagctgccgtacgtcctcggctctgcccaccagggctgcctgcctccgttcccggcggatgtcttcatgattcctcagtacggctacctgactctcaacaacggtagtcaggccgtgggacgttcctccttctactgcctggagtacttcccctctcagatgctgagaacgggcaacaacttttccttcagctacactttcgaggacgtgcctttccacagcagctacgcgcacagccagagtttggacaggctgatgaatcctctcatcgaccagtacctgtactacctgtcaagaacccagtctacgggaggcacagcgggaacccagcagttgctgttttctcaggccgggcctagcaacatgtcggctcaggccagaaactggctgcctggaccctgctacagacagcagcgcgtctccacgacactgtcgcaaaacaacaacagcaactttgcctggactggtgccaccaagtatcatctgagcggcagagactctctggtgaatccgggcgtcgccatggcaaccaacaaggacgacgaggaccgcttcttcccatccagcggcatcctcatgtttggcaagcagggagctggaaaagacaacgtggactatagcaacgtgatgctaaccagcgaggaagaaatcaagaccaccaaccccgtggccacagaacagtatggcgtggtggctgataacctacagcagcaaaacaccgctcctattgtgggggccgtcaacagccagggagccttacctggcatggtctggcagaaccgggacgtgtacctgcagggtcctatttgggccaagattcctcacacagatggcaactttcacccgtctcctttaatgggcggctttggacttaaacatccgcctcctcagatcctcatcaaaaacactcctgttcctgcggatcctccaacagcgttcaaccaggccaagctgaattcttccatcacgcagtacagcaccggacaagtcagcgtggagatcgagtgggagctgcagaaggagaacagcaagcgctggaacccagagattcagtatacttccaactactacaaatctacaaatgtggactttgctgttaatactgagggtgtttactctgagcctcgccccattggcactcgttacctcacccgtaatttgtaa

SEQ ID NO: 510 - protein, 738 aa, Artificial Sequence
  source: /note="Description of Artificial Sequence: Synthetic polypeptide"
MAADGYLPDWLEDNLSEGIREWWDLKPGAPKPKANQQKQDDGRGLVLPGYKYLGPFNGLDKGEPVNAADAAALEHDKAYDQQLKAGDNPYLRYNHADAEFQERLQEDTSFGGNLGRAVFQAKKRVLEPLGLVEEGAKTAPGKKRPVEPSPQRSPDSSTGIGKKGQQPARKRLNFGQTGDSESVPDPQPIGEPPAAPSSVGSGTMAAGGGAPMADNNEGADGVGSSSGNWHCDSTWLGDRVITTSTRTWALPAYNNHLYKQISNGTSGGSTNDNTYFGYSTPWGYFDFNRFHCHFSPRDWQRLINNNWGFRPKRLSFKLFNIQVKEVTQNEGTKTIANNLTSTIQVFTDSEYQLPYVLGSAHQGCLPPFPADVFMIPQYGYLTLNNGSQAVGRSSFYCLEYFPSQMLRTGNNFSFSYTFEDVPFHSSYAHSQSLDRLMNPLIDQYLYYLSRTQSTGGTAGTQQLLFSQAGPSNMSAQARNWLPGPCYRQQRVSTTLSQNNNSNFAWTGATKYHLSGRDSLVNPGVAMATNKDDEDRFFPSSGILMFGKQGAGKDNVDYSNVMLTSEEEIKTTNPVATEQYGVVADNLQQQNTAPIVGAVNSQGALPGMVWQNRDVYLQGPIWAKIPHTDGNFHPSPLMGGFGLKHPPPQILIKNTPVPADPPTAFNQAKLNSSITQYSTGQVSVEIEWELQKENSKRWNPEIQYTSNYYKSTNVDFAVNTEGVYSEPRPIGTRYLTRNL

SEQ ID NO: 511 - protein, 736 aa, Artificial Sequence; identical to SEQ ID NO: 11
  source: /note="Description of Artificial Sequence: Synthetic polypeptide"

SEQ ID NO: 512 - DNA, 2217 bp, Artificial Sequence
  source: /note="Description of Artificial Sequence: Synthetic polynucleotide"
atggctgctgacggttatcttccagattggctcgaggacaacctctctgagggcattcgcgagtggtgggacctgaaacctggagcccccaagcccaaggccaaccagcagaagcaggacgacggccggggtctggtgcttcctggctacaagtacctcggacccttcaacggactcgacaagggggagcccgtcaacgcggcggacgcagcggccctcgagcacgacaaggcctacgaccagcagctcaaagcgggtgacaatccgtacctgcggtataaccacgccgacgccgagtttcaggagcgtctgcaagaagatacgtcttttgggggcaacctcgggcgagcagtcttccaggccaagaagcgggttctcgaacctctcggtctggttgaggaagctgctaagacggctcctggaaagaagagaccggtagaaccgtcacctcagcgttcccccgactcctccacgggcatcggcaagaaaggccagcagcccgctaaaaagagactgaactttggtcagactggcgactcagagtcagtccccgaccctcaaccaatcggagaaccaccagcaggcccctctggtctgggatctggtacaatggctgcaggcggtggcgctccaatggcagacaataacgaaggcgccgacggagtgggtagttcctcaggaaattggcattgcgattccacatggctgggcgacagagtcatcaccaccagcacccgaacctgggccctgcccacctacaacaaccacctctacaagcaaatatccaatgggacatcgggaggaagcaccaacgacaacacctacttcggctacagcaccccctgggggtattttgacttcaacagattccactgccacttctcaccacgtgactggcagcgactcatcaacaacaactggggattccggccaaaaagactcagcttcaagctcttcaacatccaggtcaaggaggtcacgcagaatgaaggcaccaagaccatcgccaataaccttaccagcacgattcaggtatttacggactcggaataccagctgccgtacgtcctcggctccgcgcaccagggctgcctgcctccgttcccggcggacgtcttcatgattccccagtacggctaccttacactgaacaatggaagtcaagccgtaggccgttcctccttctactgcctggaatattttccatctcaaatgctgcgaactggaaacaattttgaattcagctacaccttcgaggacgtgcctttccacagcagctacgcacacagccagagcttggaccgactgatgaatcctctcatcgaccagtacctgtactacttatccagaactcagtccacaggaggaactcaaggtacccagcaattgttattttctcaagctgggcctgcaaacatgtcggctcaggctaagaactggctacctggaccttgctaccggcagcagcgagtctctacgacactgtcgcaaaacaacaacagcaactttgcttggactggtgccaccaaatatcacctgaacggaagagactctttggtaaatcccggtgtcgccatggcaacccacaaggacgacgaggaacgcttcttcccgtcgagtggagtcctgatgtttggaaaacagggtgctggaagagacaatgtggactacagcagcgttatgctaaccagcgaagaagaaattaaaaccactaaccctgtagccacagaacaatacggtgtggtggctgacaacttgcagcaaaccaatacagggcctattgtgggaaatgtcaacagccaaggagccttacctggcatggtctggcagaaccgagacgtgtacctgcagggtcccatctgggccaagattcctcacacggacggcaacttccacccttcaccgctaatgggaggatttggactgaagcacccacctcctcagatcctgatcaagaacacgccggtacctgcggatcctccaacaacgttcagccaggcgaaattggcttccttcattacgcagtacagcaccggacaggtcagcgtggaaatcgagtgggagctgcagaaggagaacagcaaacgctggaacccagagattcagtacacttcaaactactacaaatctacaaatgtggactttgctgtcaatacagagggaacttattctgagcctcgccccattggtactcgttacctcacccgtaatctgtaa

SEQ ID NO: 513 - protein, 738 aa, Artificial Sequence
  source: /note="Description of Artificial Sequence: Synthetic polypeptide"
MAADGYLPDWLEDNLSEGIREWWDLKPGAPKPKANQQKQDDGRGLVLPGYKYLGPFNGLDKGEPVNAADAAALEHDKAYDQQLKAGDNPYLRYNHADAEFQERLQEDTSFGGNLGRAVFQAKKRVLEPLGLVEEGAKTAPGKKRPVEPSPQRSPDSSTGIGKKGQQPARKRLNFGQTGDSESVPDPQPLGEPPAAPSSVGSGTMAAGGGAPMADNNEGADGVGSSSGNWHCDSTWLGDRVITTSTRTWALPTYNNHLYKQISNGTSGGSTNDNTYFGYSTPWGYFDFNRFHCHFSPRDWQRLINNNWGFRPKRLSFKLFNIQVKEVTQNEGTKTIANNLTSTIQVFTDSEYQLPYVLGSAHQGCLPPFPADVFMIPQYGYLTLNNGSQAVGRSSFYCLEYFPSQMLRTGNNFSFSYTFEDVPFHSSYAHSQSLDRLMNPLIDQYLYYLSRTQSTGGTAGTQQLLFSQAGPSNMSAQARNWLPGPCYRQQRVSTTLSQNNNSNFAWTGATKYHLNGRDSLVNPGVAMATNKDDEDRFFPSSGILMFGKQGAGKDNVDYSNVMLTSEEEIKTTNPVATEQYGVVADNLQRQNTAPIVGAVNSQGALPGMVWQNRDVYLQGPIWAKIPHTDGNFHPSPLMGGFGLKHPPPQILIKNTPVPADPPTAFNQAKLNSFITQYSTGQVSVEIEWELQKENSKRWNPEIQYTSNYYKSTNVDFAVNTEGVYSEPRPIGTRYLTRNL

SEQ ID NO: 514 - protein, 736 aa, Artificial Sequence
  source: /note="Description of Artificial Sequence: Synthetic polypeptide"
MAADGYLPDWLEDNLSEGIREWLNLKPGAPQPKANQQKQDNARGLVLPGYKYLGPFNGLDKGDPVNEADAAALEHDKAYGQQLKAGDNPYLKYNHADAEFQERLQKDTSFGGNLGKAVFQAKKRILEPLGLVETPAKTAPGKKRPVDPSPQRSPDSSSGIGKKSPHPARKRLNFGQTGEAESVPDPQPIGEPPSDPSSVGSGTMAAGGGAPMADNNEGADGVGNSSGNWHCDSTWLGDRVITTSTRTWALPTYNNHLYKQISSQSGATNDNHYFGYSTPWGYFDFNRFHCHFSPRDWQRLINNNWGFRPKRLSFKLFNIQVKEVTQNDGTTTIANNLTSTVQVFTDSEYQLPYVLGSAHQGCLPPFPADVFMIPQYGYLTLNNGSQAVGRSSFYCLEYFPSQMLRTGNNFQFSYTFEDVPFHSSYAHSQSLDRLMNPLIDQYLYYLSKTQGTNATVQGAKLQFSQAGPSNMRDQARNWLPGPCYRQQRVSKTANDNNNSEYAWTGATKYHLNGRDSLVNPGPAMASHKDDEEKFFPMNGTLVFGKNGAGNSNVDIENVMITDEEEIRTTNPVATEQYGVVSDNLQSSNTRPITGDVDSQGVLPGMVWQDRDVYLQGPIWAKIPHTDGHFHPSPLMGGFGLKHPPPQILIKNTPVPANPATTFTPGKFASFITQYSTGQVSVQIEWELQKENSKRWNPEIQYTSNYNKSVNVDFTVDTNGVYSEPRPIGTRYLTRNL

SEQ ID NO: 515 - protein, 736 aa, Artificial Sequence; identical to SEQ ID NO: 90
  source: /note="Description of Artificial Sequence: Synthetic polypeptide"

SEQ ID NO: 516 - protein, 736 aa, Artificial Sequence
  source: /note="Description of Artificial Sequence: Synthetic polypeptide"
MAADGYLPDWLEDNLSEGIREWWDLKPGAPKPKANQQKQDDGRGLVLPGYKYLGPFNGLDKGEPVNAADAAALEHDKAYDQQLKAGDNPYLRYNHADAEFQERLQEDTSFGGNLGRAVFQAKKRVLEPLGLVEEGAKTAPGKKRPVEQSPQEPDSSSGIGKTGQQPAKKRLNFGQTGDSESVPDPQPLGEPPAAPSGLGPNTMASGGGAPMADNNEGADGVGNSSGNWHCDSTWLGDRVITTSTRTWALPTYNNHLYKQISNGTSGGSTNDNTYFGYSTPWGYFDFNRFHCHFSPRDWQRLINNNWGFRPKRLNFKLFNIQVKEVTTNEGTKTIANNLTSTVQVFTDSEYQLPYVLGSAHQGCLPPFPADVFMVPQYGYLTLNNGSQALGRSSFYCLEYFPSQMLRTGNNFQFSYTFEDVPFHSSYAHSQSLDRLMNPLIDQYLYYLVRTQTTGTGGTQTLAFSQAGPSSMANQARNWVPGPCYRQQRVSTTTNQNNNSNFAWTGAAKFKLNGRDSLMNPGVAMASHKDDEDRFFPSSGVLIFGKQGAGNDGVDYSQVLITDEEEIKATNPVATEEYGAVAINNQAANTQAQTGLVHNQGVIPGMVWQNRDVYLQGPIWAKIPHTDGNFHPSPLMGGFGLKHPPPQILIKNTPVPADPPLTFNQAKLNSFITQYSTGQVSVEIEWELQKENSKRWNPEIQYTSNYYKSTNVDFAVNTEGVYSEPRPIGTRYLTRNL

SEQ ID NO: 517 - protein, 736 aa, Artificial Sequence; identical to SEQ ID NO: 516
  source: /note="Description of Artificial Sequence: Synthetic polypeptide"

SEQ ID NO: 518 - protein, 736 aa, Artificial Sequence
  source: /note="Description of Artificial Sequence: Synthetic polypeptide"
MAADGYLPDWLEDNLSEGIREWWDLKPGAPKPKANQQKQDDGRGLVLPGYKYLGPFNGLDKGEPVNAADAAALEHDKAYDQQLKAGDNPYLRYNHADAEFQERLQEDTSFGGNLGRAVFQAKKRVLEPLGLVEEGAKTAPGKKRPVEQSPQEPDSSSGIGKTGQQPAKKRLNFGQTGDSESVPDPQPLGEPPAAPSGLGPNTMASGGGAPMADNNEGADGVGNSSGNWHCDSTWLGDRVITTSTRTWALPTYNNHLYKQISNGTSGGSTNDNTYFGYSTPWGYFDFNRFHCHFSPRDWQRLINNNWGFRPKRLNFKLFNIQVKEVTTNEGTKTIANNLTSTVQVFTDSEYQLPYVLGSAHQGCLPPFPADVFMVPQYGYLTLNNGSQALGRSSFYCLEYFPSQMLRTGNNFQFSYTFEDVPFHSSYAHSQSLDRLMNPLIDQYLYYLVRTQTTGTGGTQTLAFSQAGPSSMANQARNWVPGPCYRQQRVSTTTNQNNNSNFAWTGAAKFKLNGRDSLMNPGVAMASHKDDEDRFFPSSGVLIFGKQGAGNDGVDYSQVLITDEEEIKATNPVATEEYGAVAINNQRANTQAQTGLVHNQGVIPGMVWQNRDVYLQGPIWAKIPHTDGNFHPSPLMGGFGLKHPPPQILIKNTPVPADPPLTFNQAKLNSFITQYSTGQVSVEIEWELQKENSKRWNPEIQYTSNYYKSTNVDFAVNTEGVYSEPRPIGTRYLTRNL

SEQ ID NO: 519 - protein, 736 aa, Artificial Sequence
  source: /note="Description of Artificial Sequence: Synthetic polypeptide"
MAADGYLPDWLEDNLSEGIREWWDLKPGAPKPKANQQKQDDGRGLVLPGYKYLGPFNGLDKGEPVNAADAAALEHDKAYDQQLKAGDNPYLRYNHADAEFQERLQEDTSFGGNLGRAVFQAKKRVLEPLGLVEEGAKTAPGKKRPVEQSPQEPDSSSGIGKTGQQPAKKRLNFGQTGDSESVPDPQPLGEPPAAPSGLGPNTMASGGGAPMADNNEGADGVGNSSGNWHCDSTWLGDRVITTSTRTWALPTYNNHLYKQISNGTSGGSTNDNTYFGYSTPWGYFDFNRFHCHFSPRDWQRLINNNWGFRPKRLNFKLFNIQVKEVTTNEGTKTIANNLTSTVQVFTDSEYQLPYVLGSAHQGCLPPFPADVFMVPQYGYLTLNNGSQALGRSSFYCLEYFPSQMLRTGNNFQFSYTFEDVPFHSSYAHSQSLDRLMNPLIDQYLYYLVRTQTTGTGGTQTLAFSQAGPSSMANQARNWVPGPCYRQQRVSTTTNQNNNSNFAWTGAAKFKLNGRDSLMNPGVAMASHKDDEDAFFPSSGVLIFGKQGAGNDGVDYSQVLITDEEEIKATNPVATEEYGAVAINNQAANTQAQTGLVHNQGVIPGMVWQNRDVYLQGPIWAKIPHTDGNFHPSPLMGGFGLKHPPPQILIKNTPVPADPPLTFNQAKLNSFITQYSTGQVSVEIEWELQKENSKRWNPEIQYTSNYYKSTNVDFAVNTEGVYSEPRPIGTRYLTRNL

SEQ ID NO: 520 - DNA, 1803 bp, Bovine Adeno-associated Virus
acggcgcctgcggcaaaaaagaggcctctagagcagagtcctcaagagccagactcctcgagcggagttggcaagaaaggcaaacagcctgccagaaagagactcaactttgacgacgaacctggagccggagacgggcctcccccagaaggaccatcttccggagctatgtctactgagactgaaatgcgtgcagcagctggcggaaatggtggcgatgcgggacaaggtgccgagggagtgggtaatgcctccggtgattggcattgcgattccacttggtcagagagccacgtcaccaccacctcaacccgcacctgggtcctgccgacctacaacaaccacctgtacctgcggctcggctcgagcaacgccagcgacaccttcaacggattctccaccccctggggatactttgactttaaccgcttccactgccacttctcgccaagagactggcaaaggctcatcaacaaccactggggactgcgccccaaaagcatgcaagtccgcatcttcaacatccaagttaaggaggtcacgacgtctaacggggagacgaccgtatccaacaacctcaccagcacggtccagatctttgcggacagcacgtacgagctcccgtacgtgatggatgcaggtcaggagggcagcttgcctcctttccccaacgacgtgttcatggtgcctcagtacgggtactgcggactggtaaccggaggcagctctcaaaaccagacagacagaaatgccttctactgtctggagtactttcccagccagatgctgagaaccggaaacaactttgagatggtgtacaagtttgaaaacgtgcccttccactccatgtacgctcacagccagagcctggataggctgatgaacccgctgctggaccagtacctgtgggagctccagtctaccacctctggaggaactctcaaccagggcaattcagccaccaactttgccaagctgaccaaaacaaacttttctggctaccgcaaaaactggctcccggggcccatgatgaagcagcagagattctccaagactgccagtcaaaactacaagattccccagggaagaaacaacagtctgctccattatgagaccagaactaccctcgacggaagatggagcaattttgccccgggaacggccatggcaaccgcagccaacgacgccaccgacttctctcaggcccagctcatctttgcggggcccaacatcaccggcaacaccaccacagatgccaataacctgatgttcacttcagaagatgaacttagggccaccaacccccgggacactgacctgtttggccacctggcaaccaaccagcaaaacgccaccaccgttcctaccgtagacgacgtggacggagtcggcgtgtacccgggaatggtgtggcaggacagagacatttactaccaagggcccatttgggccaaaattccacacacggatggacactttcacccgtctcctctcattggcggatttggactgaaaagcccgcctccacaaatattcatcaaaaacactcctgtacccgccaatcccgcaacgaccttctctccggccagaatcaacagcttcatcacccagtacagcaccggacaggtggctgtcaaaatagaatgggaaatccagaaggagcggtccaagagatggaacccagaggtccagttcacgtccaactacggagcacaggactcgcttctctgggctcccgacaacgccggagcctacaaagagcccagggccattggatcccgatacctcaccaaccacctctag

SEQ ID NO: 521 - DNA, 1617 bp, Bovine Adeno-associated Virus
atgcgtgcagcagctggcggaaatggtggcgatgcgggacaaggtgccgagggagtgggtaatgcctccggtgattggcattgcgattccacttggtcagagagccacgtcaccaccacctcaacccgcacctgggtcctgccgacctacaacaaccacctgtacctgcggctcggctcgagcaacgccagcgacaccttcaacggattctccaccccctggggatactttgactttaaccgcttccactgccacttctcgccaagagactggcaaaggctcatcaacaaccactggggactgcgccccaaaagcatgcaagtccgcatcttcaacatccaagttaaggaggtcacgacgtctaacggggagacgaccgtatccaacaacctcaccagcacggtccagatctttgcggacagcacgtacgagctcccgtacgtgatggatgcaggtcaggagggcagcttgcctcctttccccaacgacgtgttcatggtgcctcagtacgggtactgcggactggtaaccggaggcagctctcaaaaccagacagacagaaatgccttctactgtctggagtactttcccagccagatgctgagaaccggaaacaactttgagatggtgtacaagtttgaaaacgtgcccttccactccatgtacgctcacagccagagcctggataggctgatgaacccgctgctggaccagtacctgtgggagctccagtctaccacctctggaggaactctcaaccagggcaattcagccaccaactttgccaagctgaccaaaacaaacttttctggctaccgcaaaaactggctcccggggcccatgatgaagcagcagagattctccaagactgccagtcaaaactacaagattccccagggaagaaacaacagtctgctccattatgagaccagaactaccctcgacggaagatggagcaattttgccccgggaacggccatggcaaccgcagccaacgacgccaccgacttctctcaggcccagctcatctttgcggggcccaacatcaccggcaacaccaccacagatgccaataacctgatgttcacttcagaagatgaacttagggccaccaacccccgggacactgacctgtttggccacctggcaaccaaccagcaaaacgccaccaccgttcctaccgtagacgacgtggacggagtcggcgtgtacccgggaatggtgtggcaggacagagacatttactaccaagggcccatttgggccaaaattccacacacggatggacactttcacccgtctcctctcattggcggatttggactgaaaagcccgcctccacaaatattcatcaaaaacactcctgtacccgccaatcccgcaacgaccttctctccggccagaatcaacagcttcatcacccagtacagcaccggacaggtggctgtcaaaatagaatgggaaatccagaaggagcggtccaagagatggaacccagaggtccagttcacgtccaactacggagcacaggactcgcttctctgggctcccgacaacgccggagcctacaaagagcccagggccattggatcccgatacctcaccaaccacctctag

SEQ ID NO: 522 - DNA, 1173 bp, Bovine Adeno-associated Virus
atggcgctggtaagctggctggtggaacatggcatcacttccgagaagcagtggattcaggagaatcaggagagctacctgtccttcaactccacgggaaactctcggagccagattaaagccgcgcttgacaacgcgtcaaaaattatgagtctgaccaaatctgcctcagactatctcgtgggacagactgttccagaggacatttctgaaaacagaatctggcagatttttgatctcaacggctacgacccggcatacgcgggctctgttctctacggctggtgcactcgcgcctttggaaagaggaacaccgtctggctgtatggacccgcgaccaccggaaagaccaacatcgcggaagccatctctcacaccgtgcccttttatggctgtgtgaactggactaatgagaactttccctttaatgactgtgtggaaaaaatgttgatctggtgggaggagggaaagatgaccagcaaggtggtggaacccgccaaggccatcttgggggggtctagagtacgagtggatcaaaaatgtaaatcctctgtacaagtagactctaccccggtgattatcacctccaatactaacatgtgtgtggtggtggatgggaactccacgacctttgaacaccagcagccgctggaagaccgcatgttcagatttgaactcatgcggcggctcccgccagattttggcaagattaccaagcaggaagtcaaagacttttttgcttgggcaaaggtcaaccaggtgccggtgactcacgagtttatggttcccaagaaagtggcgggaactgagagggcggagacttctagaaaacgcccactggatgacgtcaccaataccaactataaaagtccggagaagcgggcccggctctcagttgttcctgagacgcctcgcagttcagacgtgcctgtagagcccgctcctctgcgacctctcaactggtcttccaggtatgaatgcagatgtgactatcatgctaaatttgactctgtaacgggggaatgtgacgagtgtgaatatttgaatcggggcaaaaatggctgtatctttcataatgctacacattgtcaaatttgtcacgctgttcctccatgggaaaaggaaaatgtgtcagattttaatgattttgatgactgtaataaagagcagtaa

SEQ ID NO: 523 - DNA, 1833 bp, Bovine Adeno-associated Virus
atggctaccttctatgaagtcattgttcgcgttccatttgatgtggaagagcacctgcctggaatttctgacaactttgtagactgggtaactggtcaaatttgggagctgcctcccgagtcagatttgaatttgactctgattgagcagcctcagctgacggtggctgacagaattcgccgcgtgttcctgtacgagtggaacaaattttccaagcaggagagcaaattctttgtgcagtttgaaaagggatctgaatattttcatctgcacacgctcgtggagacctccggcatctcttctatggtccttggccgctacgtgagtcagattcgcgcccagctggtgaaggtggtgttccagaacattgagccgcggattaacgactgggtcgccatcaccaaggtaaagaagggcggagccaataaggtggtggattctgggtatattcccgcctacctgctgccgaaggtccaaccagagcttcagtgggcgtggactaacctcgaagagtataaattggccgccctcaatctggaggagcgcaaacggctcgtcgctcagtttcagcttgagtcctcgcagcgctcgcaagaggcatcttcccagagggacgtttcggctgacccggtcatcaagagcaagacttcccagaaatacatggcgctggtaagctggctggtggaacatggcatcacttccgagaagcagtggattcaggagaatcaggagagctacctgtccttcaactccacgggaaactctcggagccagattaaagccgcgcttgacaacgcgtcaaaaattatgagtctgaccaaatctgcctcagactatctcgtgggacagactgttccagaggacatttctgaaaacagaatctggcagatttttgatctcaacggctacgacccggcatacgcgggctctgttctctacggctggtgcactcgcgcctttggaaagaggaacaccgtctggctgtatggacccgcgaccaccggaaagaccaacatcgcggaagccatctctcacaccgtgcccttttatggctgtgtgaactggactaatgagaactttccctttaatgactgtgtggaaaaaatgttgatctggtgggaggagggaaagatgaccagcaaggtggtggaacccgccaaggccatcttgggggggtctagagtacgagtggatcaaaaatgtaaatcctctgtacaagtagactctaccccggtgattatcacctccaatactaacatgtgtgtggtggtggatgggaactccacgacctttgaacaccagcagccgctggaagaccgcatgttcagatttgaactcatgcggcggctcccgccagattttggcaagattaccaagcaggaagtcaaagacttttttgcttgggcaaaggtcaaccaggtgccggtgactcacgagtttatggttcccaagaaagtggcgggaactgagagggcggagacttctagaaaacgcccactggatgacgtcaccaataccaactataaaagtccggagaagcgggcccggctctcagttgttcctgagacgcctcgcagttcagacgtgcctgtagagcccgctcctctgcgacctctcaactggtcttccaggtatgaatgcagatgtgactatcatgctaaatttgactctgtaacgggggaatgtgacgagtgtgaatatttgaatcggggcaaaaatggctgtatctttcataatgctacacattgtcaaatttgtcacgctgttcctccatgggaaaaggaaaatgtgtcagattttaatgattttgatgactgtaataaagagcagtaa

SEQ ID NO: 524 - DNA, 2211 bp, Bovine Adeno-associated Virus
atgtcttttgttgaccaccctccagattggttggaatcgatcggcgacggctttcgtgaatttctcggccttgaggcgggtcccccgaaacccaaggccaatcaacagaagcaagataacgctcgaggtcttgtgcttcctgggtacaagtatcttggtcctgggaacggccttgataagggcgatcctgtcaattttgctgacgaggttgcccgagagcacgacctctcctaccagaaacagcttgaggcgggcgataacccttacctcaagtacaaccacgcggacgcagagtttcaggagaaactcgcttctgacacttcttttgggggaaaccttgggaaggctgttttccaggctaaaaagaggattctcgaacctcttggcctggttgagacgccggataaaacggcgcctgcggcaaaaaagaggcctctagagcagagtcctcaagagccagactcctcgagcggagttggcaagaaaggcaaacagcctgccagaaagagactcaactttgacgacgaacctggagccggagacgggcctcccccagaaggaccatcttccggagctatgtctactgagactgaaatgcgtgcagcagctggcggaaatggtggcgatgcgggacaaggtgccgagggagtgggtaatgcctccggtgattggcattgcgattccacttggtcagagagccacgtcaccaccacctcaacccgcacctgggtcctgccgacctacaacaaccacctgtacctgcggctcggctcgagcaacgccagcgacaccttcaacggattctccaccccctggggatactttgactttaaccgcttccactgccacttctcgccaagagactggcaaaggctcatcaacaaccactggggactgcgccccaaaagcatgcaagtccgcatcttcaacatccaagttaaggaggtcacgacgtctaacggggagacgaccgtatccaacaacctcaccagcacggtccagatctttgcggacagcacgtacgagctcccgtacgtgatggatgcaggtcaggagggcagcttgcctcctttccccaacgacgtgttcatggtgcctcagtacgggtactgcggactggtaaccggaggcagctctcaaaaccagacagacagaaatgccttctactgtctggagtactttcccagccagatgctgagaaccggaaacaactttgagatggtgtacaagtttgaaaacgtgcccttccactccatgtacgctcacagccagagcctggataggctgatgaacccgctgctggaccagtacctgtgggagctccagtctaccacctctggaggaactctcaaccagggcaattcagccaccaactttgccaagctgaccaaaacaaacttttctggctaccgcaaaaactggctcccggggcccatgatgaagcagcagagattctccaagactgccagtcaaaactacaagattccccagggaagaaacaacagtctgctccattatgagaccagaactaccctcgacggaagatggagcaattttgccccgggaacggccatggcaaccgcagccaacgacgccaccgacttctctcaggcccagctcatctttgcggggcccaacatcaccggcaacaccaccacagatgccaataacctgatgttcacttcagaagatgaacttagggccaccaacccccgggacactgacctgtttggccacctggcaaccaaccagcaaaacgccaccaccgttcctaccgtagacgacgtggacggagtcggcgtgtacccgggaatggtgtggcaggacagagacatttactaccaagggcccatttgggccaaaattccacacacggatggacactttcacccgtctcctctcattggcggatttggactgaaaagcccgcctccacaaatattcatcaaaaacactcctgtacccgccaatcccgcaacgaccttctctccggccagaatcaacagcttcatcacccagtacagcaccggacaggtggctgtcaaaatagaatgggaaatccagaaggagcggtccaagagatggaacccagaggtccagttcacgtccaactacggagcacaggactcgcttctctgggctcccgacaacgccggagcctacaaagagcccagggccattggatcccgatacctcaccaaccacctctag

SEQ ID NO: 525 - DNA, 4694 bp, Bovine Adeno-associated Virus
gtggcactcccccccctgtcgcgttcgctcgttcgctggctcgattgggggggtggcagctcaaagagctgccagacgacggccctctgggccgtcgcccccccaatcgagccagcgaacgagcgaacgcgacaggggggggagtgccacactctctagcaagggggttttgtaggtggtgatgtcattgttgatgtcattatagttgtcacgcgatagttaatgattaacagtcatgtgatgtgtgttatccaataggatgaaagcgcgcgaatgagatctcgcgagacttccggggtataaaaggggtgagtgaacgagcccgccgccattctctgctctggactgctagaggaccctcgctgccatggctaccttctatgaagtcattgttcgcgttccatttgatgtggaagagcacctgcctggaatttctgacaactttgtagactgggtaactggtcaaatttgggagctgcctcccgagtcagatttgaatttgactctgattgagcagcctcagctgacggtggctgacagaattcgccgcgtgttcctgtacgagtggaacaaattttccaagcaggagagcaaattctttgtgcagtttgaaaagggatctgaatattttcatctgcacacgctcgtggagacctccggcatctcttctatggtccttggccgctacgtgagtcagattcgcgcccagctggtgaaggtggtgttccagaacattgagccgcggattaacgactgggtcgccatcaccaaggtaaagaagggcggagccaataaggtggtggattctgggtatattcccgcctacctgctgccgaaggtccaaccagagcttcagtgggcgtggactaacctcgaagagtataaattggccgccctcaatctggaggagcgcaaacggctcgtcgctcagtttcagcttgagtcctcgcagcgctcgcaagaggcatcttcccagagggacgtttcggctgacccggtcatcaagagcaagacttcccagaaatacatggcgctggtaagctggctggtggaacatggcatcacttccgagaagcagtggattcaggagaatcaggagagctacctgtccttcaactccacgggaaactctcggagccagattaaagccgcgcttgacaacgcgtcaaaaattatgagtctgaccaaatctgcctcagactatctcgtgggacagactgttccagaggacatttctgaaaacagaatctggcagatttttgatctcaacggctacgacccggcatacgcgggctctgttctctacggctggtgcactcgcgcctttggaaagaggaacaccgtctggctgtatggacccgcgaccaccggaaagaccaacatcgcggaagccatctctcacaccgtgcccttttatggctgtgtgaactggactaatgagaactttccctttaatgactgtgtggaaaaaatgttgatctggtgggaggagggaaagatgaccagcaaggtggtggaacccgccaaggccatcttgggggggtctagagtacgagtggatcaaaaatgtaaatcctctgtacaagtagactctaccccggtgattatcacctccaatactaacatgtgtgtggtggtggatgggaactccacgacctttgaacaccagcagccgctggaagaccgcatgttcagatttgaactcatgcggcggctcccgccagattttggcaagattaccaagcaggaagtcaaagacttttttgcttgggcaaaggtcaaccaggtgccggtgactcacgagtttatggttcccaagaaagtggcgggaactgagagggcggagacttctagaaaacgcccactggatgacgtcaccaataccaactataaaagtccggagaagcgggcccggctctcagttgttcctgagacgcctcgcagttcagacgtgcctgtagagcccgctcctctgcgacctctcaactggtcttccaggtatgaatgcagatgtgactatcatgctaaatttgactctgtaacgggggaatgtgacgagtgtgaatatttgaatcggggcaaaaatggctgtatctttcataatgctacacattgtcaaatttgtcacgctgttcctccatgggaaaaggaaaatgtgtcagattttaatgattttgatgactgtaataaagagcagtaaataaagtgagtagtcatgtcttttgttgaccaccctccagattggttggaatcgatcggcgacggctttcgtgaatttctcggccttgaggcgggtcccccgaaacccaaggccaatcaacagaagcaagataacgctcgaggtcttgtgcttcctgggtacaagtatcttggtcctgggaacggccttgataagggcgatcctgtcaattttgctgacgaggttgcccgagagcacgacctctcctaccagaaacagcttgaggcgggcgataacccttacctcaagtacaaccacgcggacgcagagtttcaggagaaactcgcttctgacacttcttttgggggaaaccttgggaaggctgttttccaggctaaaaagaggattctcgaacctcttggcctggttgagacgccggataaaacggcgcctgcggcaaaaaagaggcctctagagcagagtcctcaagagccagactcctcgagcggagttggcaagaaaggcaaacagcctgccagaaagagactcaactttgacgacgaacctggagccggagacgggcctcccccagaaggaccatcttccggagctatgtctactgagactgaaatgcgtgcagcagctggcggaaatggtggcgatgcgggacaaggtgccgagggagtgggtaatgcctccggtgattggcattgcgattccacttggtcagagagccacgtcaccaccacctcaacccgcacctgggtcctgccgacctacaacaaccacctgtacctgcggctcggctcgagcaacgccagcgacaccttcaacggattctccaccccctggggatactttgactttaaccgcttccactgccacttctcgccaagagactggcaaaggctcatcaacaaccactggggactgcgccccaaaagcatgcaagtccgcatcttcaacatccaagttaaggaggtcacgacgtctaacggggagacgaccgtatccaacaacctcaccagcacggtccagatctttgcggacagcacgtacgagctcccgtacgtgatggatgcaggtcaggagggcagcttgcctcctttccccaacgacgtgttcatggtgcctcagtacgggtactgcggactggtaaccggaggcagctctcaaaaccagacagacagaaatgccttctactgtctggagtactttcccagccagatgctgagaaccggaaacaactttgagatggtgtacaagtttgaaaacgtgcccttccactccatgtacgctcacagccagagcctggataggctgatgaacccgctgctggaccagtacctgtgggagctccagtctaccacctctggaggaactctcaaccagggcaattcagccaccaactttgccaagctgaccaaaacaaacttttctggctaccgcaaaaactggctcccggggcccatgatgaagcagcagagattctccaagactgccagtcaaaactacaagattccccagggaagaaacaacagtctgctccattatgagaccagaactaccctcgacggaagatggagcaattttgccccgggaacggccatggcaaccgcagccaacgacgccaccgacttctctcaggcccagctcatctttgcggggcccaacatcaccggcaacaccaccacagatgccaataacctgatgttcacttcagaagatgaacttagggccaccaacccccgggacactgacctgtttggccacctggcaaccaaccagcaaaacgccaccaccgttcctaccgtagacgacgtggacggagtcggcgtgtacccgggaatggtgtggcaggacagagacatttactaccaagggcccatttgggccaaaattccacacacggatggacactttcacccgtctcctctcattggcggatttggactgaaaagcccgcctccacaaatattcatcaaaaacactcctgtacccgccaatcccgcaacgaccttctctccggccagaatcaacagcttcatcacccagtacagcaccggacaggtggctgtcaaaatagaatgggaaatccagaaggagcggtccaagagatggaacccagaggtccagttcacgtccaactacggagcacaggactcgcttctctgggctcccgacaacgccggagcctacaaagagcccagggccattggatcccgatacctcaccaaccacctctagcccaattctgttgcataccctcaataaaccgtgtattcgtttcagtaaaatactgcctcttgtggtcattcggcgtacaacagcttacaacaacaacaaaacccccttgctagagagtgtggcactcccccccctgtcgcgttcgctcgttcgctggctcgattgggggggtggcagctcaaagagctgccagacgacggccctctgggccgtcgcccccccaatcgagccagcgaacgagcgaacgcgacaggggggggagtgccac

SEQ ID NO: 526 - protein, 390 aa, Bovine Adeno-associated Virus
MALVSWLVEHGITSEKQWIQENQESYLSFNSTGNSRSQIKAALDNASKIMSLTKSASDYLVGQTVPEDISENRIWQIFDLNGYDPAYAGSVLYGWCTRAFGKRNTVWLYGPATTGKTNIAEAISHTVPFYGCVNWTNENFPFNDCVEKMLIWWEEGKMTSKVVEPAKAILGGSRVRVDQKCKSSVQVDSTPVIITSNTNMCVVVDGNSTTFEHQQPLEDRMFRFELMRRLPPDFGKITKQEVKDFFAWAKVNQVPVTHEFMVPKKVAGTERAETSRKRPLDDVTNTNYKSPEKRARLSVVPETPRSSDVPVEPAPLRPLNWSSRYECRCDYHAKFDSVTGECDECEYLNRGKNGCIFHNATHCQICHAVPPWEKENVSDFNDFDDCNKEQ

SEQ ID NO: 527 - protein, 610 aa, Bovine Adeno-associated Virus
MATFYEVIVRVPFDVEEHLPGISDNFVDWVTGQIWELPPESDLNLTLIEQPQLTVADRIRRVFLYEWNKFSKQESKFFVQFEKGSEYFHLHTLVETSGISSMVLGRYVSQIRAQLVKVVFQNIEPRINDWVAITKVKKGGANKVVDSGYIPAYLLPKVQPELQWAWTNLEEYKLAALNLEERKRLVAQFQLESSQRSQEASSQRDVSADPVIKSKTSQKYMALVSWLVEHGITSEKQWIQENQESYLSFNSTGNSRSQIKAALDNASKIMSLTKSASDYLVGQTVPEDISENRIWQIFDLNGYDPAYAGSVLYGWCTRAFGKRNTVWLYGPATTGKTNIAEAISHTVPFYGCVNWTNENFPFNDCVEKMLIWWEEGKMTSKVVEPAKAILGGSRVRVDQKCKSSVQVDSTPVIITSNTNMCVVVDGNSTTFEHQQPLEDRMFRFELMRRLPPDFGKITKQEVKDFFAWAKVNQVPVTHEFMVPKKVAGTERAETSRKRPLDDVTNTNYKSPEKRARLSVVPETPRSSDVPVEPAPLRPLNWSSRYECRCDYHAKFDSVTGECDECEYLNRGKNGCIFHNATHCQICHAVPPWEKENVSDFNDFDDCNKEQ

SEQ ID NO: 528 - protein, 538 aa, Bovine Adeno-associated Virus
MRAAAGGNGGDAGQGAEGVGNASGDWHCDSTWSESHVTTTSTRTWVLPTYNNHLYLRLGSSNASDTFNGFSTPWGYFDFNRFHCHFSPRDWQRLINNHWGLRPKSMQVRIFNIQVKEVTTSNGETTVSNNLTSTVQIFADSTYELPYVMDAGQEGSLPPFPNDVFMVPQYGYCGLVTGGSSQNQTDRNAFYCLEYFPSQMLRTGNNFEMVYKFENVPFHSMYAHSQSLDRLMNPLLDQYLWELQSTTSGGTLNQGNSATNFAKLTKTNFSGYRKNWLPGPMMKQQRFSKTASQNYKIPQGRNNSLLHYETRTTLDGRWSNFAPGTAMATAANDATDFSQAQLIFAGPNITGNTTTDANNLMFTSEDELRATNPRDTDLFGHLATNQQNATTVPTVDDVDGVGVYPGMVWQDRDIYYQGPIWAKIPHTDGHFHPSPLIGGFGLKSPPPQIFIKNTPVPANPATTFSPARINSFITQYSTGQVAVKIEWEIQKERSKRWNPEVQFTSNYGAQDSLLWAPDNAGAYKEPRAIGSRYLTNHL

SEQ ID NO: 529 - protein, 736 aa, Artificial Sequence
  source: /note="Description of Artificial Sequence: Synthetic polypeptide"
MSFVDHPPDWLESIGDGFREFLGLEAGPPKPKANQQKQDNARGLVLPGYKYLGPGNGLDKGDPVNFADEVAREHDLSYQKQLEAGDNPYLKYNHADAEFQEKLASDTSFGGNLGKAVFQAKKRILEPLGLVETPDKTAPAAKKRPLEQSPQEPDSSSGVGKKGKQPARKRLNFDDEPGAGDGPPPEGPSSGAMSTETEMRAAAGGNGGDAGQGAEGVGNASGDWHCDSTWSESHVTTTSTRTWVLPTYNNHLYLRLGSSNASDTFNGFSTPWGYFDFNRFHCHFSPRDWQRLINNHWGLRPKSMQVRIFNIQVKEVTTSNGETTVSNNLTSTVHIFADSTYELPYVMDAGQEGSLPPFPNDVFMVPQYGYCGLVTGGSSQNQTDRNAFYCLEYFPSQMLRTGNNFEMVYKFENVPFHSMYAHSQSLDRLMNPLLDQYLWELQSTTSGGTLNQGNSATNFAKLTNKNFSGYRKNWLPGPMMKQQRFSKTASQNYKIPQGGNNSLLHYETRTTLDRRWSNFAPGTAMATAANDATDFSQAQLIFAGPNITGNTTTDANNLMFTSEDELRATNPRDTDLFGHLATNQQNATTVPTVDDVDGVGVYPGMVWQDRDIYYQGPIWAKIPHTDGHFHPSPLIGGFGLKSPPPQIFIKNTPVPANPATTFSPARINSFITQYSTGQVAVKIEWEIQKERSKRWNPEVQFTSNYGAQDSLLWAPDNAGAYKEPRAIGSRYLTNHL

SEQ ID NO: 530 - protein, 736 aa, Artificial Sequence
  source: /note="Description of Artificial Sequence: Synthetic polypeptide"
MSFVDHPPDWLESIGDGFREFLGLEAGPPKPKANQQKQDNARGLVLPGYKYLGPGNGLDKGDPVNFADEVAREHDLSYQKQLEAGDNPYLKYNHADAEFQEKLASDTSFGGNLGKAVFQAKKRILEPLGLVETPDKTAPAAKKRPLEQSPQEPDSSSGVGKKGKQPARKRLNFDDEPGAGDGPPPEGPSSGAMSTETEMRAAAGGNGGDAGQGAEGVGNASGDWHCDSTWSESHVTTTSTRTWVLPTYNNHLYLRLGSSNASDTFNGFSTPWGYFDFNRFHCHFSPRDWQRLINNHWGLRPKSMQVRIFNIQVKEVTTSNGETTVSNNLTSTVQIFADSTYELPYVMDAGQEGSLPPFPNDVFMVPQYGYCGLVTGGSSQNQTDRNAFYCLEYFPSQMLRTGNNFEMVYKFENVPFHSMYAHSQSLDRLMNPLLDQYLWELQSTTSGGTLNQGNSATNFAKLTKTNFSGYRKNWLPGPMMKQQRFSKTASQNYKIPQGRNNSLLHYETRTTLDGRWSNFAPGTAMATAANDATDFSQAQLIFAGPNITGNTTTDANNLMFTSEDELRATNPRDTDLFGHLATNQQNATTVPTVDDVDGVGVYPGMVWQDRDIYYQGPIWAKIPHTDGHFHPSPLIGGFGLKSPPPQIFIKNTPVPANPATTFSPARINSFITQYSTGQVAVKIEWEIQKERSKRWNPEVQFTSNYGAQDSLLWAPDNAGAYKEPRAIGSRYLTNHL

SEQ ID NO: 531 - protein, 736 aa, Bovine Adeno-associated Virus; identical to SEQ ID NO: 530

SEQ ID NO: 532 - protein, 600 aa, Bovine Adeno-associated Virus
TAPAAKKRPLEQSPQEPDSSSGVGKKGKQPARKRLNFDDEPGAGDGPPPEGPSSGAMSTETEMRAAAGGNGGDAGQGAEGVGNASGDWHCDSTWSESHVTTTSTRTWVLPTYNNHLYLRLGSSNASDTFNGFSTPWGYFDFNRFHCHFSPRDWQRLINNHWGLRPKSMQVRIFNIQVKEVTTSNGETTVSNNLTSTVQIFADSTYELPYVMDAGQEGSLPPFPNDVFMVPQYGYCGLVTGGSSQNQTDRNAFYCLEYFPSQMLRTGNNFEMVYKFENVPFHSMYAHSQSLDRLMNPLLDQYLWELQSTTSGGTLNQGNSATNFAKLTKTNFSGYRKNWLPGPMMKQQRFSKTASQNYKIPQGRNNSLLHYETRTTLDGRWSNFAPGTAMATAANDATDFSQAQLIFAGPNITGNTTTDANNLMFTSEDELRATNPRDTDLFGHLATNQQNATTVPTVDDVDGVGVYPGMVWQDRDIYYQGPIWAKIPHTDGHFHPSPLIGGFGLKSPPPQIFIKNTPVPANPATTFSPARINSFITQYSTGQVAVKIEWEIQKERSKRWNPEVQFTSNYGAQDSLLWAPDNAGAYKEPRAIGSRYLTNHL

SEQ ID NO: 533 - DNA, 2214 bp, Artificial Sequence
  source: /note="Description of Artificial Sequence: Synthetic polynucleotide"
atggctgccgatggttatcttccagattggctcgaggacactctctctgaaggaataagacagtggtggaagctcaaacctggcccaccaccaccaaagcccgcagagcggcataaggacgacagcaggggtcttgtgcttcctgggtacaagtacctcggacccttcaacggactcgacaagggagagccggtcaacgaggcagacgccgcggccctcgagcacgacaaagcctacgaccggcagctcgacagcggagacaacccgtacctcaagtacaaccacgccgacgcggagtttcaggagcgccttaaagaagatacgtcttttgggggcaacctcgggcgagcagtcttccaggccaaaaagaggcttcttgaacctcttggtctggttgaggaagcggctaagacggctcctggaaagaagaggcctgtagagcagtctcctcaggaaccggactcctcctcgggcatcggcaagacaggccagcagcccgctaaaaagagactcaatttcggtcagactggcgacacagagtcagtcccagaccctcaaccaatcggagaacctcccgcagccccctcaggtgtgggatctcttacaatggcttcaggtggtggcgcaccagtggcagacaataacgaaggtgccgatggagtgggtagttcctcgggaaattggcattgcgattcccaatggctgggggacagagtcatcaccaccagcacccgaacctgggccctgcccacctacaacaatcacctctacaagcaaatctccaacgggacatcgggaggagccaccaacgacaacacctacttcggctacagcaccccctgggggtattttgactttaacagattccactgccacttttcaccacgtgactggcagcgactcatcaacaacaactggggattccggcccaagagactcagcttcaagctcttcaacatccaggtcaaggaggtcacgcagaatgaaggcaccaagaccatcgccaataaccttaccagcacggtccaggtcttcacggactcggagtaccagctgccgtacgttctcggctctgcccaccagggctgcctgcctccgttcccggcggacgtgttcatgattccccagtacggctacctaacactcaacaacggtagtcaggccgtgggacgctcctccttctactgcctggaatactttccttcgcagatgctgagaaccggcaacaacttccagtttacttacaccttcgaggacgtgcctttccacagcagctacgcccacagccagagcttggaccggctgatgaatcctctgattgaccagtacctgtactacttgtctcggactcaaacaacaggaggcacggcaaatacgcagactctgggcttcagccaaggtgggcctaatacaatggccaatcaggcaaagaactggctgccaggaccctgttaccgccaacaacgcgtctcaacgacaaccgggcaaaacaacaatagcaactttgcctggactgctgggaccaaataccatctgaatggaagaaattcattggctaatcctggcatcgctatggcaacacacaaagacgacaaggagcgtttttttcccagtaacgggatcctgatttttggcaaacaaaatgctgccagagacaatgcggattacagcgatgtcatgctcaccagcgaggaagaaatcaaaaccactaaccctgtggctacagaggaatacggtatcgtggcagataacttgcagcagcaaaacacggctcctcaaattggaactgtcaacagccagggggccttacccggtatggtttggcagaaccgggacgtgtacctgcagggtcccatctgggccaagattcctcacacggacggcaacttccacccgtctccgctgatgggcggctttggcctgaaacatcctccgcctcagatcctgatcaagaacacgcctgtacctgcggatcctccgaccaccttcaaccagtcaaagctgaactctttcatcacgcaatacagcaccggacaggtcagcgtggaaattgaatgggagctgcagaaggaaaacagcaagcgctggaaccccgagatccagtacacctccaactactacaaatctacaagtgtggactttgctgttaatacagaaggcgtgtactctgaaccccaccccattggcacccgttacctcacccgtcccctgtaa

SEQ ID NO: 534 - protein, 737 aa, Artificial Sequence
  source: /note="Description of Artificial Sequence: Synthetic polypeptide"
MAADGYLPDWLEDTLSEGIRQWWKLKPGPPPPKPAERHKDDSRGLVLPGYKYLGPFNGLDKGEPVNEADAAALEHDKAYDRQLDSGDNPYLKYNHADAEFQERLKEDTSFGGNLGRAVFQAKKRLLEPLGLVEEAAKTAPGKKRPVEQSPQEPDSSSGIGKTGQQPAKKRLNFGQTGDTESVPDPQPIGEPPAAPSGVGSLTMASGGGAPVADNNEGADGVGSSSGNWHCDSQWLGDRVITTSTRTWALPTYNNHLYKQISNGTSGGATNDNTYFGYSTPWGYFDFNRFHCHFSPRDWQRLINNNWGFRPKRLSFKLFNIQVKEVTQNEGTKTIANNLTSTVQVFTDSEYQLPYVLGSAHQGCLPPFPADVFMIPQYGYLTLNNGSQAVGRSSFYCLEYFPSQMLRTGNNFQFTYTFEDVPFHSSYAHSQSLDRLMNPLIDQYLYYLSRTQTTGGTANTQTLGFSQGGPNTMANQAKNWLPGPCYRQQRVSTTTGQNNNSNFAWTAGTKYHLNGRNSLANPGIAMATHKDDKERFFPSNGILIFGKQNAARDNADYSDVMLTSEEEIKTTNPVATEEYGIVADNLQQQNTAPQIGTVNSQGALPGMVWQNRDVYLQGPIWAKIPHTDGNFHPSPLMGGFGLKHPPPQILIKNTPVPADPPTTFNQSKLNSFITQYSTGQVSVEIEWELQKENSKRWNPEIQYTSNYYKSTSVDFAVNTEGVYSEPHPIGTRYLTRPL

SEQ ID NO: 535 - protein, 736 aa, Artificial Sequence
  source: /note="Description of Artificial Sequence: Synthetic polypeptide"
MAADGYLPDWLEDNLSEGIREWWDLKPGAPKPKANQQKQDDGRGLVLPGYKYLGPFNGLDKGEPVNAADAAALEHDKAYDQQLKAGDNPYLRYNHADAEFQERLQEDTSFGGNLGRAVFQAKKRVLEPLGLVEEGAKTAPGKKRPVEQSPQEPDSSSGIGKTGQQPAKKRLNFGQTGDTESVPDPQPIGEPPAAPSGVGSLTMASGGGAPVADNNEGADGVGSSSGNWHCDSQWLGDRVITTSTRTWALPTYNNHLYKQISSASTGASNDNHYFGYSTPWGYFDFNRFHCHFSPRDWQRLINNNWGFRPKRLNFKLFNIQVKEVTDNNGVKTIANNLTSTVQVFTDSDYQLPYVLGSAHQGCLPPFPADVFMIPQYGYLTLNNGSQAVGRSSFYCLEYFPSQMLRTGNNFQFTYTFEDVPFHSSYAHSQSLDRLMNPLIDQYLYYLSRTQTTGGTANTQTLGFSQGGPNTMANQAKNWLPGPCYRQQRVSTTTGQNNNSNFAWTAGTKYHLNGRNSLANPGIAMATHKDDKERFFPSNGILIFGKQNAARDNADYSDVMLTSEEEIKTTNPVATEEYGIVADNLQQQNTAPQIGTVNSQGALPGMVWQNRDVYLQGPIWAKIPHTDGNFHPSPLMGGFGLKHPPPQILIKNTPVPADPPTTFNQSKLNSFITQYSTGQVSVEIEWELQKENSKRWNPEIQYTSNYYKSTSVDFAVNTEGVYSEPHPIGTRYLTRPL

SEQ ID NO: 536 - protein, 736 aa, Artificial Sequence
  source: /note="Description of Artificial Sequence: Synthetic polypeptide"
MAADGYLPDWLEDTLSEGIRQWWKLKPGPPPPKPAERHKDDSRGLVLPGYKYLGPFNGLDKGEPVNEADAAALEHDKAYDRQLDSGDNPYLKYNHADAEFQERLQGDTSFGGNLGRAVFQAKKRVLEPLGLVEEGAKTAPGKKRPVEQSPQEPDSSSGIGETGQQPAKKRLNFGQTGDSESVPDPQPLGEPPATPAAVGPTTMASGGGAPMADNNEGADGVGSSSGNWHCDSQWLGDRVITTSTRTWALPTYNNHLYKQISSASTGASNDNHYFGYSTPWGYFDFNRFHCHFSPRDWQRLINNNWGFRPKRLSFKLFNIQVKEVTDNNGVKTIANNLTSTVQVFTDSEYQLPYVLGSAHQGCLPPFPADVFMIPQYGYLTLNNGSQAVGRSSFYCLEYFPSQMLRTGNNFTFSYTFEDVPFHSSYAHSQSLDRLMNPLIDQYLYYLSRTQTTGGTANTQTLGFSQGGPNTMANQAKNWLPGPCYRQQRVSTTTGQNNNSNFAWTAGTKYHLNGRNSLANPGIAMATHKDDKERFFPSNGILIFGKQNAARDNADYSDVMLTSEEEIKTTNPVATEEYGIVADNLQQQNTAPQIGTVNSQGALPGMVWQNRDVYLQGPIWAKIPHTDGNFHPSPLMGGFGLKHPPPQILIKNTPVPADPPTTFNQSKLNSFITQYSTGQVSVEIEWELQKENSKRWNPEIQYTSNYYKSTSVDFAVNTEGVYSEPHPIGTRYLTRPL

SEQ ID NO: 537 - DNA, 2181 bp, Artificial Sequence
  source: /note="Description of Artificial Sequence: Synthetic polynucleotide"
atgtcttttgttgatcaccctccagattggttggaagaagttggtgaaggtcttcgcgagtttttgggccttgaagcgggcccaccgaaaccaaaacccaatcagcagcatcaagatcaagcccgtggtcttgtgctgcctggttataactatctcggacccggaaacggtctcgatcgaggagagcctgtcaacagggcagacgaggtcgcgcgagagcacgacatctcgtacaacgagcagcttgaggcgggagacaacccctacctcaagtacaaccacgcggacgccgagtttcaggagaagctcgccgacgacacatccttcgggggaaacctcggaaaggcagtctttcaggccaagaaaagggttctcgaaccttttggcctggttgaagagggtgctaagacggcccctaccggaaagcggatagacgaccactttccaaaaagaaagaaggctcggaccgaagaggactccaagccttccacctcgtcagacgccgaagctggacccagcggatcccagcagctgcaaatcccagcacaaccagcctcaagtttgggagctgatacaatgtctgcgggaggtggcggcccattgggcgacaataaccaaggtgccgatggagtgggcaatgcctcgggagattggcattgcgattccacgtggatgggggacagagtcgtcaccaagtccacccgcacctgggtgctgcccagctacaacaaccaccagtaccgagagatcaaaagcggctccgtcgacggaagcaacgccaacgcctactttggatacagcaccccctgggggtactttgactttaaccgcttccacagccactggagcccccgagactggcaaagactcatcaacaactattggggcttcagaccccggtctctcagagtcaaaatcttcaacatccaagtcaaagaggtcacggtgcaggactccaccaccaccatcgccaacaacctcacctccaccgtccaagtgtttacggacgacgactaccaactcccgtacgtcgtcggcaacgggaccgagggatgcctgccggccttccccccgcaggtctttacgctgccgcagtacggctacgcgacgctgaaccgagacaacggagacaacccgacagagcggagcagcttcttttgcctagagtactttcccagcaagatgctgaggacgggcaacaactttgagtttacctacagctttgaagaggtgcccttccactgcagcttcgccccgagccagaacctctttaagctggccaacccgctggtggaccagtacctgtaccgcttcgtgagcacctcggccacgggcgccatccagttccaaaagaacctggcgggcagatacgccaacacctacaaaaactggttcccggggcccatgggccgaacccagggctggaacacgagctctggggtcagcagcaccaacagagtcagcgtcaacaacttttccgtctcaaaccggatgaacctggagggggccagctaccaagtgaacccccagcccaacgggatgacaaacacgctccaaggcagcaaccgctacgcgctggaaaacaccatgatcttcaacgctcaaaacgccacgccgggaactacctcggtgtacccagaggacaatctactgctgaccagcgagagcgagactcagcccgtcaaccgggtggcttacaacacgggcggtcagatggccaccaacgcccagaacgccaccacggctcccacggtcgggacctacaacctccaggaagtgcttcctggcagcgtatggatggagagggacgtgtacctccaaggacccatctgggccaagatcccagagacgggggcgcactttcacccctctccggccatgggcggattcggactcaaacacccgccgcccatgatgctcatcaaaaacacgccggtgcccggcaacatcaccagcttctcggacgtgcccgtcagcagcttcatcacccagtacagcaccgggcaggtcaccgtggagatggaatgggagctcaaaaaggaaaactccaagaggtggaacccagagatccagtacaccaacaactacaacgacccccagtttgtggactttgctccagacggctccggcgaatacagaaccaccagagccatcggaacccgatacctcacccgacccctt

SEQ ID NO: 538 - protein, 726 aa, Artificial Sequence
  source: /note="Description of Artificial Sequence: Synthetic polypeptide"
MSFVDHPPDWLEEVGEGLREFLGLEAGPPKPKPNQQHQDQARGLVLPGYNYLGPGNGLDRGEPVNRADEVAREHDISYNEQLEAGDNPYLKYNHADAEFQEKLADDTSFGGNLGKAVFQAKKRVLEPFGLVEEGAKTAPTGKRIDDHFPKRKKARTEEDSKPSTSSDAEAGPSGSQQLQIPAQPASSLGADTMSAGGGGPLGDNNQGADGVGNASGDWHCDSTWMGDRVVTKSTRTWVLPSYNNHQYREIKSGSVDGSNANAYFGYSTPWGYFDFNRFHSHWSPRDWQRLINNYWGFRPRSLRVKIFNIQVKEVTVQDSTTTIANNLTSTVQVFTDDDYQLPYVVGNGTEGCLPAFPPQVFTLPQYGYATLNRDNGDNPTERSSFFCLEYFPSKMLRTGNNFEFTYSFEEVPFHCSFAPSQNLFKLANPLVDQYLYRFVSTSATGAIQFQKNLAGRYANTYKNWFPGPMGRTQGWNTSSGSSTNRVSVNNFSVSNRMNLEGASYQVNPQPNGMTNTLQGSNRYALENTMIFNAQNATPGTTSVYPEDNLLLTSESETQPVNRVAYNTGGQMATNAQNATTAPTVGTYNLQEVLPGSVWMERDVYLQGPIWAKIPETGAHFHPSPAMGGFGLKHPPPMMLIKNTPVPGNITSFSDVPVSSFITQYSTGQVTVEMEWELKKENSKRWNPEIQYTNNYNDPQFVDFAPDGSGEYRTTRAIGTRYLTRPL

SEQ ID NO: 539 - protein, 735 aa, Artificial Sequence
  source: /note="Description of Artificial Sequence: Synthetic polypeptide"
MAADGYLPDWLEDTLSEGIRQWWKLKPGPPPPKPAERHKDDSRGLVLPGYKYLGPFNGLDKGEPVNEADAAALEHDKAYDRQLDSGDNPYLKYNHADAEFQERLKEDTSFGGNLGRAVFQAKKRILEPLGLVEEPVKTAPGKKRPVEHSPAEPDSSSGTGKSGQQPARKRLNFGQTGDADSVPDPQPLGQPPAAPSGLGTNTMASGSGAPMADNNEGADGVGNSSGNWHCDSTWMGDRVITTSTRTWALPTYNNHLYKQISSQSGASNDNHYFGYSTPWGYFDFNRFHCHFSPRDWQRLINNNWGFRPKRLSFKLFNIQVKEVTQNDGTTTIANNLTSTVQVFTDSEYQLPYVLGSAHQGCLPPFPADVFMVPQYGYLTLNNGSQAVGRSSFYCLEYFPSQMLRTGNNFTFSYTFEDVPFHSSYAHSQSLDRLMNPLIDQYLYYLSRTNTPSGTTTMSRLQFSQAGASDIRDQSRNWLPGPCYRQQRVSKTAADNNNSDYSWTGATKYHLNGRDSLVNPGPAMASHKDDEEKYFPQSGVLIFGKQDSGKTNVDIEKVMITDEEEIRTTNPVATEQYGSVSTNLQSGNTQAATSDVNTQGVLPGMVWQDRDVYLQGPIWAKIPHTDGHFHPSPLMGGFGLKHPPPQILIKNTPVPANPSTTFSAAKFASFITQYSTGQVSVEIEWELQKENSKRWNPEIQYTSNYNKSVNVDFTVDTNGVYSEPRPIGTRYLTRNL

SEQ ID NO: 540 - DNA, 1797 bp, Artificial Sequence
  source: /note="Description of Artificial Sequence: Synthetic polynucleotide"
acggctccgaccggagacaagcggaaaggcgaagacgaacctcgtttgcccgacacttcttcacagactcccaagaaaaacaagaagcctcgcaaggaaagaccttccggcggggcagaagatccgggcgaaggcacctcttccaacgctggagcagcagcacccgcctctagtgtgggatcatctatcatggctgaaggaggtggcggcccagtgggcgatgcaggccagggtgccgatggagtgggcaattcctccggaaattggcattgcgattcccaatggctggaaaacggagtcgtcactcgaaccacccgaacctgggtcttgcccagctacaacaaccacctgtacaaacgaatccaaggacccagcggaggcgacaacaacaacaaattctttggattcagcaccccctggggatactttgactacaatcgattccactgccacttttccccgcgagactggcaacgactcatcaacaacaactggggcatccgtcccaaagcgatgcgctttagactctttaacatccaggttaaagaggtcacggtccaagacttcaacaccaccatcggcaacaacctcaccagtacggtccaggtctttgcggacaaggactaccaactgccgtacgtcctcggatcggctaccgaaggcaccttcccgccgttcccagcggatatctacacgatcccgcagtacgggtactgcacgctaaactacaacaacgaggcggtggatcgttcggccttctactgtctggactactttccctcagacatgctgcggacaggaaataactttgagtttacttacaccttcgaggacgttcctttccatagcatgtttgcccacaaccagacgctagaccggctgatgaatcccctcgtggatcagtacctctgggctttcagctccgtcagccaagcaggctcatctggacgagctcttcattactcgcgggcgactaaaaccaacatggcggctcaatataggaactggttacctgggcctttcttccgtgatcagcaaatctttacgggcgctagcaacatcactaaaaataacgtctttagcgtttgggaaaaaggcaagcaatgggaactcgacaatcggaccaacctaatgcagcccggtcctgcggcagcgaccacctttagcggagaacctgaccgtcaagccatgcaaaacacgctggcttttagcaggaccgtctacgatcaaacgaccgccacgaccgatcgtaaccagatactcatcaccaacgaagacgaaatcagacccaccaactcggtcggtatcgacgcgtggggagcagttcccaccaacaaccagtcgatcgtgacccccggcactcgcgcggccgtcaacaatcaaggggcgcttcccgggatggtgtggcaaaacagagacatttaccctacagggacccatttggccaaaattcccgacactgacaatcacttccatccgtccccgcttattgggcggtttggctgcaagcatccccctccccagattttcattaaaaacacacccgtccctgccaacccttcggaaacgttccagacggccaaagtggcctccttcatcaaccagtactcgaccggacagtgcaccgtcgaaatcttttgggaactcaagaaggaaacctccaagcgctggaaccccgaaatccagttcacctccaactttggcaacgcggccgacatccagtttgccgtctccgacacgggatcctattccgaacctcgtcccatcggtacccgttaccttaccaaacctctgtaa

SEQ ID NO: 541 - DNA, 1989 bp, Artificial Sequence
  source: /note="Description of Artificial Sequence: Synthetic polynucleotide"
atgaggtcgtactacgaggtcatcgttcagctgcccaacgacgtcgagagtcaggtacctggaatctccgattcgttcgtcaactggattacgtcgcgagaatggacgttgcctgaggacgccgattgggatttggaccaggtcgatcaagttcaactgacgctcggcgacaaaatccaacgggagattcgaactcattgggggacgatggccaaagaaccggactttcactattttatccaactggaacaaggtgaggtgttctttcatttacacgtcctgctggaaacgtgttccgtaaagccgatggtactcggaagatatatccgacatattcaacaaaaaattgtgagtaaagtctactgcgccacgagcctacgatggaaggatggatgcgtggtgaccaagaccaaaaatttcgggggcgcgaacaaggtccgggccgagtcgtatattcccgcctacctgatcccgaaacagcaaccggaagtgcagtgggcgtggactaacgtgcccgagtatataaaagcgtgcttgcaccgagaactgcgtgccagtctcgcgcgacttcacttcgaggaggcgggcgtctcgcaatccaaggaaaatctcgcgagaactgcagacggcgctcccgtgatgccgacccgcgtcagcaaacgctacatggagctcgtggattggctcgtggagaaggggatcaccaccgagaaggaatggctgctggaaaacagagaaagctttcggagctttcaggcctcgagcaactcggcgcgtcagatcaagacggccctgcaaggcgccattcaggagatgcttctgaccaagacggcggaggactacctcgtcggaaaggatcccgtctcggacgacgacatccgtcagaaccgcatctacaagattctggaactgaaccactacgacccagcgtacgtggggagtattttggtcgggtggtgccagaagaaatggggcaagcgaaacacgctgtggctgttcggacatgcgaccaccggcaagaccaacatcgcggaggctattgcccatgctgtgccgttctatggatgcgttaactggaccaacgagaactttccgttcaacgactgcgtcgaaaaaatgattatctggtgggaggagggcaaaatgaccgccaaagtggtggaaacagccaaggcgattctgggaggatctcgggtgagagtggaccaaaaatgcaaagcttcggttccgatcgaaccgacgccggtcattattaccagtaacaccaacatgtgttatgtcatcgacgggaacacgaccacgttcgagcataagcagccgttggaggacaggatgtttaagctcgaattgctgactcggttgcctgatgactttggtaaggtgaccaaacaggaggtgcgtcaattcttcaggtggtctcaggatcacctgacccctgtgatcccagaattcctagtgcggaaggcggagtctcgcaaaagacccgccccttccggggaaggctatataagcccgacaaagcggcccgcgctcgcagagcagcagcaggcgtcggagagcgcggacccggttcccaccaggtatcgtatcaaatgctcgaaacattgcggtatggataaaatgttgtttccttgccaaatttgtgaatcgatgaacagagatattaatatttgtgctattcataaaacgaccgactgtaaagagtgtttccccgactacggggataaagatgatgtagaactacccccctgtacagaacacaacgtgtctcgttgttatcaatgtcattcgggcgaattgtatcgcgtgacttcggactctgacgagaaacctgcccccgagagtgatgaaggcaccgagccatcctatgctccctgcacgattcaccacctgatgggcaagagtcacgggttagtcacttgcgcggcgtgtcggttgaaaaatagtacgttgcatgatgacttggatgacggtgatctcgaacaataa

SEQ ID NO: 542 - DNA, 1626 bp, Artificial Sequence
  source: /note="Description of Artificial Sequence: Synthetic polynucleotide"
atgaggtcgtactacgaggtcatcgttcagctgcccaacgacgtcgagagtcaggtacctggaatctccgattcgttcgtcaactggattacgtcgcgagaatggacgttgcctgaggacgccgattgggatttggaccaggtcgatcaagttcaactgacgctcggcgacaaaatccaacgggagattcgaactcattgggggacgatggccaaagaaccggactttcactattttatccaactggaacaaggtgaggtgttctttcatttacacgtcctgctggaaacgtgttccgtaaagccgatggtactcggaagatatatccgacatattcaacaaaaaattgtgagtaaagtctactgcgccacgagcctacgatggaaggatggatgcgtggtgaccaagaccaaaaatttcgggggcgcgaacaaggtccgggccgagtcgtatattcccgcctacctgatcccgaaacagcaaccggaagtgcagtgggcgtggactaacgtgcccgagtatataaaagcgtgcttgcaccgagaactgcgtgccagtctcgcgcgacttcacttcgaggaggcgggcgtctcgcaatccaaggaaaatctcgcgagaactgcagacggcgctcccgtgatgccgacccgcgtcagcaaacgctacatggagctcgtggattggctcgtggagaaggggatcaccaccgagaaggaatggctgctggaaaacagagaaagctttcggagctttcaggcctcgagcaactcggcgcgtcagatcaagacggccctgcaaggcgccattcaggagatgcttctgaccaagacggcggaggactacctcgtcggaaaggatcccgtctcggacgacgacatccgtcagaaccgcatctacaagattctggaactgaaccactacgacccagcgtacgtggggagtattttggtcgggtggtgccagaagaaatggggcaagcgaaacacgctgtggctgttcggacatgcgaccaccggcaagaccaacatcgcggaggctattgcccatgctgtgccgttctatggatgcgttaactggaccaacgagaactttccgttcaacgactgcgtcgaaaaaatgattatctggtgggaggagggcaaaatgaccgccaaagtggtggaaacagccaaggcgattctgggaggatctcgggtgagagtggaccaaaaatgcaaagcttcggttccgatcgaaccgacgccggtcattattaccagtaacaccaacatgtgttatgtcatcgacgggaacacgaccacgttcgagcataagcagccgttggaggacaggatgtttaagctcgaattgctgactcggttgcctgatgactttggtaaggtgaccaaacaggaggtgcgtcaattcttcaggtggtctcaggatcacctgacccctgtgatcccagaattcctagtgcggaaggcggagtctcgcaaaagacccgccccttccggggaaggctatataagcccgacaaagcggcccgcgctcgcagagcagcagcaggcgtcggagagcgcggacccggttcccaccagattggttggagcggttggtcaaaaagggagtgaatgctgcagctga

SEQ ID NO: 543 - DNA, 1323 bp, Artificial Sequence
  source: /note="Description of Artificial Sequence: Synthetic polynucleotide"
atggagctcgtggattggctcgtggagaaggggatcaccaccgagaaggaatggctgctggaaaacagagaaagctttcggagctttcaggcctcgagcaactcggcgcgtcagatcaagacggccctgcaaggcgccattcaggagatgcttctgaccaagacggcggaggactacctcgtcggaaaggatcccgtctcggacgacgacatccgtcagaaccgcatctacaagattctggaactgaaccactacgacccagcgtacgtggggagtattttggtcgggtggtgccagaagaaatggggcaagcgaaacacgctgtggctgttcggacatgcgaccaccggcaagaccaacatcgcggaggctattgcccatgctgtgccgttctatggatgcgttaactggaccaacgagaactttccgttcaacgactgcgtcgaaaaaatgattatctggtgggaggagggcaaaatgaccgccaaagtggtggaaacagccaaggcgattctgggaggatctcgggtgagagtggaccaaaaatgcaaagcttcggttccgatcgaaccgacgccggtcattattaccagtaacaccaacatgtgttatgtcatcgacgggaacacgaccacgttcgagcataagcagccgttggaggacaggatgtttaagctcgaattgctgactcggttgcctgatgactttggtaaggtgaccaaacaggaggtgcgtcaattcttcaggtggtctcaggatcacctgacccctgtgatcccagaattcctagtgcggaaggcggagtctcgcaaaagacccgccccttccggggaaggctatataagcccgacaaagcggcccgcgctcgcagagcagcagcaggcgtcggagagcgcggacccggttcccaccaggtatcgtatcaaatgctcgaaacattgcggtatggataaaatgttgtttccttgccaaatttgtgaatcgatgaacagagatattaatatttgtgctattcataaaacgaccgactgtaaagagtgtttccccgactacggggataaagatgatgtagaactacccccctgtacagaacacaacgtgtctcgttgttatcaatgtcattcgggcgaattgtatcgcgtgacttcggactctgacgagaaacctgcccccgagagtgatgaaggcaccgagccatcctatgctccctgcacgattcaccacctgatgggcaagagtcacgggttagtcacttgcgcggcgtgtcggttgaaaaatagtacgttgcatgatgacttggatgacggtgatctcgaacaataa

SEQ ID NO: 544 - DNA, 960 bp, Artificial Sequence
  source: /note="Description of Artificial Sequence: Synthetic polynucleotide"
atggagctcgtggattggctcgtggagaaggggatcaccaccgagaaggaatggctgctggaaaacagagaaagctttcggagctttcaggcctcgagcaactcggcgcgtcagatcaagacggccctgcaaggcgccattcaggagatgcttctgaccaagacggcggaggactacctcgtcggaaaggatcccgtctcggacgacgacatccgtcagaaccgcatctacaagattctggaactgaaccactacgacccagcgtacgtggggagtattttggtcgggtggtgccagaagaaatggggcaagcgaaacacgctgtggctgttcggacatgcgaccaccggcaagaccaacatcgcggaggctattgcccatgctgtgccgttctatggatgcgttaactggaccaacgagaactttccgttcaacgactgcgtcgaaaaaatgattatctggtgggaggagggcaaaatgaccgccaaagtggtggaaacagccaaggcgattctgggaggatctcgggtgagagtggaccaaaaatgcaaagcttcggttccgatcgaaccgacgccggtcattattaccagtaacaccaacatgtgttatgtcatcgacgggaacacgaccacgttcgagcataagcagccgttggaggacaggatgtttaagctcgaattgctgactcggttgcctgatgactttggtaaggtgaccaaacaggaggtgcgtcaattcttcaggtggtctcaggatcacctgacccctgtgatcccagaattcctagtgcggaaggcggagtctcgcaaaagacccgccccttccggggaaggctatataagcccgacaaagcggcccgcgctcgcagagcagcagcaggcgtcggagagcgcggacccggttcccaccagattggttggagcggttggtcaaaaagggagtgaatgctgcagctga

SEQ ID NO: 545 - DNA, 1608 bp, Artificial Sequence
  source: /note="Description of Artificial Sequence: Synthetic polynucleotide"
atggctgaaggaggtggcggcccagtgggcgatgcaggccagggtgccgatggagtgggcaattcctccggaaattggcattgcgattcccaatggctggaaaacggagtcgtcactcgaaccacccgaacctgggtcttgcccagctacaacaaccacctgtacaaacgaatccaaggacccagcggaggcgacaacaacaacaaattctttggattcagcaccccctggggatactttgactacaatcgattccactgccacttttccccgcgagactggcaacgactcatcaacaacaactggggcatccgtcccaaagcgatgcgctttagactctttaacatccaggttaaagaggtcacggtccaagacttcaacaccaccatcggcaacaacctcaccagtacggtccaggtctttgcggacaaggactaccaactgccgtacgtcctcggatcggctaccgaaggcaccttcccgccgttcccagcggatatctacacgatcccgcagtacgggtactgcacgctaaactacaacaacgaggcggtggatcgttcggccttctactgtctggactactttccctcagacatgctgcggacaggaaataactttgagtttacttacaccttcgaggacgttcctttccatagcatgtttgcccacaaccagacgctagaccggctgatgaatcccctcgtggatcagtacctctgggctttcagctccgtcagccaagcaggctcatctggacgagctcttcattactcgcgggcgactaaaaccaacatggcggctcaatataggaactggttacctgggcctttcttccgtgatcagcaaatctttacgggcgctagcaacatcactaaaaataacgtctttagcgtttgggaaaaaggcaagcaatgggaactcgacaatcggaccaacctaatgcagcccggtcctgcggcagcgaccacctttagcggagaacctgaccgtcaagccatgcaaaacacgctggcttttagcaggaccgtctacgatcaaacgaccgccacgaccgatcgtaaccagatactcatcaccaacgaagacgaaatcagacccaccaactcggtcggtatcgacgcgtggggagcagttcccaccaacaaccagtcgatcgtgacccccggcactcgcgcggccgtcaacaatcaaggggcgcttcccgggatggtgtggcaaaacagagacatttaccctacagggacccatttggccaaaattcccgacactgacaatcacttccatccgtccccgcttattgggcggtttggctgcaagcatccccctccccagattttcattaaaaacacacccgtccctgccaacccttcggaaacgttccagacggccaaagtggcctccttcatcaaccagtactcgaccggacagtgcaccgtcgaaatcttttgggaactcaagaaggaaacctccaagcgctggaaccccgaaatccagttcacctccaactttggcaacgcggccgacatccagtttgccgtctccgacacgggatcctattccgaacctcgtcccatcggtacccgttaccttaccaaacctctgtaa

SEQ ID NO: 546 - DNA, 2232 bp, Artificial Sequence
  source: /note="Description of Artificial Sequence: Synthetic polynucleotide"
atgtctctcatttctgatgcgattccagattggttggagcggttggtcaaaaagggagtgaatgctgcagctgatttctaccatttggaaagcggtcctcctcgtcctaaggcaaatcagcaaactcaagaatctcttgaaaaggacgattcgagaggtctcgtgttcccaggctacaattatctaggccctttcaacggtctagataaaggagaacccgtcaacgaggcagacgctgccgccttagaacacgacaaggcttacgacctcgaaatcaaggacgggcacaacccgtactttgagtacaacgaggccgacagacgtttccaggaacgtctcaaagacgatacctcctttggaggcaatttaggtaaagccatcttccaggccaaaaagagggttctcgaaccctttggtctggtggaagactcaaagacggctccgaccggagacaagcggaaaggcgaagacgaacctcgtttgcccgacacttcttcacagactcccaagaaaaacaagaagcctcgcaaggaaagaccttccggcggggcagaagatccgggcgaaggcacctcttccaacgctggagcagcagcacccgcctctagtgtgggatcatctatcatggctgaaggaggtggcggcccagtgggcgatgcaggccagggtgccgatggagtgggcaattcctccggaaattggcattgcgattcccaatggctggaaaacggagtcgtcactcgaaccacccgaacctgggtcttgcccagctacaacaaccacctgtacaaacgaatccaaggacccagcggaggcgacaacaacaacaaattctttggattcagcaccccctggggatactttgactacaatcgattccactgccacttttccccgcgagactggcaacgactcatcaacaacaactggggcatccgtcccaaagcgatgcgctttagactctttaacatccaggttaaagaggtcacggtccaagacttcaacaccaccatcggcaacaacctcaccagtacggtccaggtctttgcggacaaggactaccaactgccgtacgtcctcggatcggctaccgaaggcaccttcccgccgttcccagcggatatctacacgatcccgcagtacgggtactgcacgctaaactacaacaacgaggcggtggatcgttcggccttctactgtctggactactttccctcagacatgctgcggacaggaaataactttgagtttacttacaccttcgaggacgttcctttccatagcatgtttgcccacaaccagacgctagaccggctgatgaatcccctcgtggatcagtacctctgggctttcagctccgtcagccaagcaggctcatctggacgagctcttcattactcgcgggcgactaaaaccaacatggcggctcaatataggaactggttacctgggcctttcttccgtgatcagcaaatctttacgggcgctagcaacatcactaaaaataacgtctttagcgtttgggaaaaaggcaagcaatgggaactcgacaatcggaccaacctaatgcagcccggtcctgcggcagcgaccacctttagcggagaacctgaccgtcaagccatgcaaaacacgctggcttttagcaggaccgtctacgatcaaacgaccgccacgaccgatcgtaaccagatactcatcaccaacgaagacgaaatcagacccaccaactcggtcggtatcgacgcgtggggagcagttcccaccaacaaccagtcgatcgtgacccccggcactcgcgcggccgtcaacaatcaaggggcgcttcccgggatggtgtggcaaaacagagacatttaccctacagggacccatttggccaaaattcccgacactgacaatcacttccatccgtccccgcttattgggcggtttggctgcaagcatccccctccccagattttcattaaaaacacacccgtccctgccaacccttcggaaacgttccagacggccaaagtggcctccttcatcaaccagtactcgaccggacagtgcaccgtcgaaatcttttgggaactcaagaaggaaacctccaagcgctggaaccccgaaatccagttcacctccaactttggcaacgcggccgacatccagtttgccgtctccgacacgggatcctattccgaacctcgtcccatcggtacccgttaccttaccaaacctctgtaa

SEQ ID NO: 547 - protein, 535 aa, Artificial Sequence
  source: /note="Description of Artificial Sequence: Synthetic polypeptide"
MAEGGGGPVGDAGQGADGVGNSSGNWHCDSQWLENGVVTRTTRTWVLPSYNNHLYKRIQGPSGGDNNNKFFGFSTPWGYFDYNRFHCHFSPRDWQRLINNNWGIRPKAMRFRLFNIQVKEVTVQDFNTTIGNNLTSTVQVFADKDYQLPYVLGSATEGTFPPFPADIYTIPQYGYCTLNYNNEAVDRSAFYCLDYFPSDMLRTGNNFEFTYTFEDVPFHSMFAHNQTLDRLMNPLVDQYLWAFSSVSQAGSSGRALHYSRATKTNMAAQYRNWLPGPFFRDQQIFTGASNITKNNVFSVWEKGKQWELDNRTNLMQPGPAAATTFSGEPDRQAMQNTLAFSRTVYDQTTATTDRNQILITNEDEIRPTNSVGIDAWGAVPTNNQSIVTPGTRAAVNNQGALPGMVWQNRDIYPTGTHLAKIPDTDNHFHPSPLIGRFGCKHPPPQIFIKNTPVPANPSETFQTAKVASFINQYSTGQCTVEIFWELKKETSKRWNPEIQFTSNFGNAADIQFAVSDTGSYSEPRPIGTRYLTKPL

SEQ ID NO: 548 - protein, 440 aa, Artificial Sequence
  source: /note="Description of Artificial Sequence: Synthetic polypeptide"
MELVDWLVEKGITTEKEWLLENRESFRSFQASSNSARQIKTALQGAIQEMLLTKTAEDYLVGKDPVSDDDIRQNRIYKILELNHYDPAYVGSILVGWCQKKWGKRNTLWLFGHATTGKTNIAEAIAHAVPFYGCVNWTNENFPFNDCVEKMIIWWEEGKMTAKVVETAKAILGGSRVRVDQKCKASVPIEPTPVIITSNTNMCYVIDGNTTTFEHKQPLEDRMFKLELLTRLPDDFGKVTKQEVRQFFRWSQDHLTPVIPEFLVRKAESRKRPAPSGEGYISPTKRPALAEQQQASESADPVPTRYRIKCSKHCGMDKMLFPCQICESMNRDINICAIHKTTDCKECFPDYGDKDDVELPPCTEHNVSRCYQCHSGELYRVTSDSDEKPAPESDEGTEPSYAPCTIHHLMGKSHGLVTCAACRLKNSTLHDDLDDGDLEQ

SEQ ID NO: 549 - protein, 319 aa, Artificial Sequence
  source: /note="Description of Artificial Sequence: Synthetic polypeptide"
MELVDWLVEKGITTEKEWLLENRESFRSFQASSNSARQIKTALQGAIQEMLLTKTAEDYLVGKDPVSDDDIRQNRIYKILELNHYDPAYVGSILVGWCQKKWGKRNTLWLFGHATTGKTNIAEAIAHAVPFYGCVNWTNENFPFNDCVEKMIIWWEEGKMTAKVVETAKAILGGSRVRVDQKCKASVPIEPTPVIITSNTNMCYVIDGNTTTFEHKQPLEDRMFKLELLTRLPDDFGKVTKQEVRQFFRWSQDHLTPVIPEFLVRKAESRKRPAPSGEGYISPTKRPALAEQQQASESADPVPTRLVGAVGQKGSECCS

SEQ ID NO: 550 - protein, 662 aa, Artificial Sequence
  source: /note="Description of Artificial Sequence: Synthetic polypeptide"
MRSYYEVIVQLPNDVESQVPGISDSFVNWITSREWTLPEDADWDLDQVDQVQLTLGDKIQREIRTHWGTMAKEPDFHYFIQLEQGEVFFHLHVLLETCSVKPMVLGRYIRHIQQKIVSKVYCATSLRWKDGCVVTKTKNFGGANKVRAESYIPAYLIPKQQPEVQWAWTNVPEYIKACLHRELRASLARLHFEEAGVSQSKENLARTADGAPVMPTRVSKRYMELVDWLVEKGITTEKEWLLENRESFRSFQASSNSARQIKTALQGAIQEMLLTKTAEDYLVGKDPVSDDDIRQNRIYKILELNHYDPAYVGSILVGWCQKKWGKRNTLWLFGHATTGKTNIAEAIAHAVPFYGCVNWTNENFPFNDCVEKMIIWWEEGKMTAKVVETAKAILGGSRVRVDQKCKASVPIEPTPVIITSNTNMCYVIDGNTTTFEHKQPLEDRMFKLELLTRLPDDFGKVTKQEVRQFFRWSQDHLTPVIPEFLVRKAESRKRPAPSGEGYISPTKRPALAEQQQASESADPVPTRYRIKCSKHCGMDKMLFPCQICESMNRDINICAIHKTTDCKECFPDYGDKDDVELPPCTEHNVSRCYQCHSGELYRVTSDSDEKPAPESDEGTEPSYAPCTIHHLMGKSHGLVTCAACRLKNSTLHDDLDDGDLEQ

SEQ ID NO: 551 - protein, 541 aa, Artificial Sequence
  source: /note="Description of Artificial Sequence: Synthetic polypeptide"
MRSYYEVIVQLPNDVESQVPGISDSFVNWITSREWTLPEDADWDLDQVDQVQLTLGDKIQREIRTHWGTMAKEPDFHYFIQLEQGEVFFHLHVLLETCSVKPMVLGRYIRHIQQKIVSKVYCATSLRWKDGCVVTKTKNFGGANKVRAESYIPAYLIPKQQPEVQWAWTNVPEYIKACLHRELRASLARLHFEEAGVSQSKENLARTADGAPVMPTRVSKRYMELVDWLVEKGITTEKEWLLENRESFRSFQASSNSARQIKTALQGAIQEMLLTKTAEDYLVGKDPVSDDDIRQNRIYKILELNHYDPAYVGSILVGWCQKKWGKRNTLWLFGHATTGKTNIAEAIAHAVPFYGCVNWTNENFPFNDCVEKMIIWWEEGKMTAKVVETAKAILGGSRVRVDQKCKASVPIEPTPVIITSNTNMCYVIDGNTTTFEHKQPLEDRMFKLELLTRLPDDFGKVTKQEVRQFFRWSQDHLTPVIPEFLVRKAESRKRPAPSGEGYISPTKRPALAEQQQASESADPVPTRLVGAVGQKGSECCS

SEQ ID NO: 552 - protein, 743 aa, Artificial Sequence
  source: /note="Description of Artificial Sequence: Synthetic polypeptide"
MSLISDAIPDWLERLVKKGVNAAADFYHLESGPPRPKANQQTQESLEKDDSRGLVFPGYNYLGPFNGLDKGEPVNEADAAALEHDKAYDLEIKDGHNPYFEYNEADRRFQERLKDDTSFGGNLGKAIFQAKKRVLEPFGLVEDSKTAPTGDKRKGEDEPRLPDTSSQTPKKNKKPRKERPSGGAEDPGEGTSSNAGAAAPASSVGSSIMAEGGGGPVGDAGQGADGVGNSSGNWHCDSQWLENGVVTRTTRTWVLPSYNNHLYKRIQGPSGGDNNNKFFGFSTPWGYFDYNRFHCHFSPRDWQRLINNNWGIRPKAMRFRLFNIQVKEVTVQDFNTTIGNNLTSTVQVFADKDYQLPYVLGSATEGTFPPFPADIYTIPQYGYCTLNYNNEAVDRSAFYCLDYFPSDMLRTGNNFEFTYTFEDVPFHSMFAHNQTLDRLMNPLVDQYLWAFSSVSQAGSSGRALHYSRATKTNMAAQYRNWLPGPFFRDQQIFTGASNITKNNVFSVWEKGKQWELDNRTNLMQPGPAAATTFSGEPDRQAMQNTLAFSRTVYDQTTATTDRNQILITNEDEIRPTNSVGIDAWGAVPTNNQSIVTPGTRAAVNNQGALPGMVWQNRDIYPTGTHLAKIPDTDNHFHPSPLIGRFGCKHPPPQIFIKNTPVPANPSETFQTAKVASFINQYSTGQCTVEIFWELKKETSKRWNPEIQFTSNFGNAADIQFAVSDTGSYSEPRPIGTRYLTKPL

SEQ ID NO: 553 - protein, 598 aa, Artificial Sequence
  source: /note="Description of Artificial Sequence: Synthetic polypeptide"
TAPTGDKRKGEDEPRLPDTSSQTPKKNKKPRKERPSGGAEDPGEGTSSNAGAAAPASSVGSSIMAEGGGGPVGDAGQGADGVGNSSGNWHCDSQWLENGVVTRTTRTWVLPSYNNHLYKRIQGPSGGDNNNKFFGFSTPWGYFDYNRFHCHFSPRDWQRLINNNWGIRPKAMRFRLFNIQVKEVTVQDFNTTIGNNLTSTVQVFADKDYQLPYVLGSATEGTFPPFPADIYTIPQYGYCTLNYNNEAVDRSAFYCLDYFPSDMLRTGNNFEFTYTFEDVPFHSMFAHNQTLDRLMNPLVDQYLWAFSSVSQAGSSGRALHYSRATKTNMAAQYRNWLPGPFFRDQQIFTGASNITKNNVFSVWEKGKQWELDNRTNLMQPGPAAATTFSGEPDRQAMQNTLAFSRTVYDQTTATTDRNQILITNEDEIRPTNSVGIDAWGAVPTNNQSIVTPGTRAAVNNQGALPGMVWQNRDIYPTGTHLAKIPDTDNHFHPSPLIGRFGCKHPPPQIFIKNTPVPANPSETFQTAKVASFINQYSTGQCTVEIFWELKKETSKRWNPEIQFTSNFGNAADIQFAVSDTGSYSEPRPIGTRYLTKPL

SEQ ID NO: 554 - DNA, 4694 bp, Artificial Sequence
  source: /note="Description of Artificial Sequence: Synthetic polynucleotide"
tggccagtttccaagacaggctcgctcgctcactcgggccggggccccaaaggggcccctagcgaccgcttcgcggtcgcggcccgagtgagcgagcgagcctgtcttggaaactggccagcactccggtgaggtaatgccgtcacgtggtcgggaatgggaacgggaaatctcgcgagaacgtaaacaaatataagacggcgccacacggcgctgcgtcatacgcgcgcgcgcaccggcgagatgaggtcgtactacgaggtcatcgttcagctgcccaacgacgtcgagagtcaggtacctggaatctccgattcgttcgtcaactggattacgtcgcgagaatggacgttgcctgaggacgccgattgggatttggaccaggtcgatcaagttcaactgacgctcggcgacaaaatccaacgggagattcgaactcattgggggacgatggccaaagaaccggactttcactattttatccaactggaacaaggtgaggtgttctttcatttacacgtcctgctggaaacgtgttccgtaaagccgatggtactcggaagatatatccgacatattcaacaaaaaattgtgagtaaagtctactgcgccacgagcctacgatggaaggatggatgcgtggtgaccaagaccaaaaatttcgggggcgcgaacaaggtccgggccgagtcgtatattcccgcctacctgatcccgaaacagcaaccggaagtgcagtgggcgtggactaacgtgcccgagtatataaaagcgtgcttgcaccgagaactgcgtgccagtctcgcgcgacttcacttcgaggaggcgggcgtctcgcaatccaaggaaaatctcgcgagaactgcagacggcgctcccgtgatgccgacccgcgtcagcaaacgctacatggagctcgtggattggctcgtggagaaggggatcaccaccgagaaggaatggctgctggaaaacagagaaagctttcggagctttcaggcctcgagcaactcggcgcgtcagatcaagacggccctgcaaggcgccattcaggagatgcttctgaccaagacggcggaggactacctcgtcggaaaggatcccgtctcggacgacgacatccgtcagaaccgcatctacaagattctggaactgaaccactacgacccagcgtacgtggggagtattttggtcgggtggtgccagaagaaatggggcaagcgaaacacgctgtggctgttcggacatgcgaccaccggcaagaccaacatcgcggaggctattgcccatgctgtgccgttctatggatgcgttaactggaccaacgagaactttccgttcaacgactgcgtcgaaaaaatgattatctggtgggaggagggcaaaatgaccgccaaagtggtggaaacagccaaggcgattctgggaggatctcgggtgagagtggaccaaaaatgcaaagcttcggttccgatcgaaccgacgccggtcattattaccagtaacaccaacatgtgttatgtcatcgacgggaacacgaccacgttcgagcataagcagccgttggaggacaggatgtttaagctcgaattgctgactcggttgcctgatgactttggtaaggtgaccaaacaggaggtgcgtcaattcttcaggtggtctcaggatcacctgacccctgtgatcccagaattcctagtgcggaaggcggagtctcgcaaaagacccgccccttccggggaaggctatataagcccgacaaagcggcccgcgctcgcagagcagcagcaggcgtcggagagcgcggacccggttcccaccaggtatcgtatcaaatgctcgaaacattgcggtatggataaaatgttgtttccttgccaaatttgtgaatcgatgaacagagatattaatatttgtgctattcataaaacgaccgactgtaaagagtgtttccccgactacggggataaagatgatgtagaactacccccctgtacagaacacaacgtgtctcgttgttatcaatgtcattcgggcgaattgtatcgcgtgacttcggactctgacgagaaacctgcccccgagagtgatgaaggcaccgagccatcctatgctccctgcacgattcaccacctgatgggcaagagtcacgggttagtcacttgcgcggcgtgtcggttgaaaaatagtacgttgcatgatgacttggatgacggtgatctcgaacaataaatgattgaaatgtagccatgtctctcatttctgatgcgattccagattggttggagcggttggtcaaaaagggagtgaatgctgcagctgatttctaccatttggaaagcggtcctcctcgtcctaaggcaaatcagcaaactcaagaatctcttgaaaaggacgattcgagaggtctcgtgttcccaggctacaattatctaggccctttcaacggtctagataaaggagaacccgtcaacgaggcagacgctgccgccttagaacacgacaaggcttacgacctcgaaatcaaggacgggcacaacccgtactttgagtacaacgaggccgacagacgtttccaggaacgtctcaaagacgatacctcctttggaggcaatttaggtaaagccatcttccaggccaaaaagagggttctcgaaccctttggtctggtggaagactcaaagacggctccgaccggagacaagcggaaaggcgaagacgaacctcgtttgcccgacacttcttcacagactcccaagaaaaacaagaagcctcgcaaggaaagaccttccggcggggcagaagatccgggcgaaggcacctcttccaacgctggagcagcagcacccgcctctagtgtgggatcatctatcatggctgaaggaggtggcggcccagtgggcgatgcaggccagggtgccgatggagtgggcaattcctccggaaattggcattgcgattcccaatggctggaaaacggagtcgtcactcgaaccacccgaacctgggtcttgcccagctacaacaaccacctgtacaaacgaatccaaggacccagcggaggcgacaacaacaacaaattctttggattcagcaccccctggggatactttgactacaatcgattccactgccacttttccccgcgagactggcaacgactcatcaacaacaactggggcatccgtcccaaagcgatgcgctttagactctttaacatccaggttaaagaggtcacggtccaagacttcaacaccaccatcggcaacaacctcaccagtacggtccaggtctttgcggacaaggactaccaactgccgtacgtcctcggatcggctaccgaaggcaccttcccgccgttcccagcggatatctacacgatcccgcagtacgggtactgcacgctaaactacaacaacgaggcggtggatcgttcggccttctactgtctggactactttccctcagacatgctgcggacaggaaataactttgagtttacttacaccttcgaggacgttcctttccatagcatgtttgcccacaaccagacgctagaccggctgatgaatcccctcgtggatcagtacctctgggctttcagctccgtcagccaagcaggctcatctggacgagctcttcattactcgcgggcgactaaaaccaacatggcggctcaatataggaactggttacctgggcctttcttccgtgatcagcaaatctttacgggcgctagcaacatcactaaaaataacgtctttagcgtttgggaaaaaggcaagcaatgggaactcgacaatcggaccaacctaatgcagcccggtcctgcggcagcgaccacctttagcggagaacctgaccgtcaagccatgcaaaacacgctggcttttagcaggaccgtctacgatcaaacgaccgccacgaccgatcgtaaccagatactcatcaccaacgaagacgaaatcagacccaccaactcggtcggtatcgacgcgtggggagcagttcccaccaacaaccagtcgatcgtgacccccggcactcgcgcggccgtcaacaatcaaggggcgcttcccgggatggtgtggcaaaacagagacatttaccctacagggacccatttggccaaaattcccgacactgacaatcacttccatccgtccccgcttattgggcggtttggctgcaagcatccccctccccagattttcattaaaaacacacccgtccctgccaacccttcggaaacgttccagacggccaaagtggcctccttcatcaaccagtactcgaccggacagtgcaccgtcgaaatcttttgggaactcaagaaggaaacctccaagcgctggaaccccgaaatccagttcacctccaactttggcaacgcggccgacatccagtttgccgtctccgacacgggatcctattccgaacctcgtcccatcggtacccgttaccttaccaaacctctgtaaattaaacccttcaataaaccgtttatgcgtaactgtatttccgtctcctgtcgttattcagtcacatgatgcggcattacctcaccggagtgctggccagtttccaagacaggctcgctcgctcactcgggccggggccccaaaggggcccctagcgaccgcttcgcggtcgcggcccgagtgagcgagcgagcctgtcttggaaactggcca

SEQ ID NO: 555 - DNA, 2211 bp, Artificial Sequence
  source: /note="Description of Artificial Sequence: Synthetic polynucleotide"
atggctgctgatggttatcttccagattggctcgaggacactctctctgaaggaataagacagtggtggaagctcaaacctggcccaccaccaccaaagcccgcagagcggcataaggacgacagcaggggtcttgtgcttcctgggtacaagtacctcggacccttcaacggactcgacaagggagagccggtcaacgaggcagacgcagcggccctcgagcacgacaaggcctacgaccagcagctcaaggccggtgacaacccctacctcaagtacaaccacgccgacgcggagttccagcagcggcttcagggcgacacatcgtttgggggcaacctcggcagagcagtcttccaggccaaaaagagggttcttgaacctcttggtctggttgagcaagcgggtgagacggctcctggaaagaagagaccgttgattgaatccccccagcagcccgactcctccacgggtatcggcaaaaaaggcaagcagccggctaaaaagagactcaattttggtcagactggcgactcagagtcagtccccgacccacaacctctcggagaacctccagcaacccccgctgctgtgggacctactacaatggcttcaggtggtggcgcaccaatggcagacaataacgaaggcgccgacggagtgggtaatgcctcaggaaattggcattgcgattccacatggctgggcgacagagtcatcaccaccagcacccgcacctgggccttgcccacctacaataaccacctctacaagcaaatctccagtgcttcaacgggggccagcaacgacaaccactacttcggctacagcaccccctgggggtattttgacttcaacagattccactgccacttttcaccacgtgactggcagcgactcatcaacaacaattggggattccggcccaagagactcaacttcaaactcttcaacatccaagtcaaggaggtcacgacgaatgatggcgtcacaaccatcgctaataaccttaccagcacggttcaagtcttctcggactcagactatcagctcccgtacgtgctcgggtcggctcacgagggctgcctcccgccgttcccagcagacgtcttcatggtgccacagtatggatacctcaccctgaacaacgggagtcaggcagtaggacgctcttcattttactgcctggagtactttccttctcagatgctgcgtaccggaaacaactttaccttcagctacacttttgaggacgttcctttccacagcagctacgctcacagccagagtctggaccgtctcatgaatcctctcatcgaccagtacctgtattacctgaacagaactcagaatcagtccggaagtgcccaaaacaaggacttgctgtttagccgggggtctccagctggcatgtctgttcagcccaaaaactggctacctggaccctgttatcggcagcagcgcgtttctaaaacaaaaacagacaacaacaacagcaactttacctggactggtgcttcaaaatataaccttaatgggcgtgaatctataatcaaccctggcactgctatggcctcacacaaagacgacaaagacaagttctttcccatgagcggtgtcatgatttttggaaaggagagcgccggagcttcaaacactgcattggacaatgtcatgatcacagacgaagaggaaatcaaagccactaaccccgtggccaccgaaagatttgggactgtggcagtcaatctccagagcagcagcacagaccctgcgaccggagatgtgcatgttatgggagccttacctggaatggtgtggcaagacagagacgtatacctgcagggtcccatttgggccaaaattcctcacacagatggacactttcacccgtctcctcttatgggcggctttggactcaagaacccgcctcctcagatcctcatcaaaaacacgcctgttcctgcgaatcctccggcggagttttcagctacaaagtttgcttcattcatcacccaatactccacaggacaagtgagtgtggaaattgaatgggagctgcagaaagaaaacagcaagcgctggaatcccgaagtgcagtacacatccaattatgcaaaatctgccaacgttgattttactgtggacaacaatggactttatactgagcctcgccccattggcacccgttacctcacccgtcccctgtaa

SEQ ID NO: 556 - protein, 736 aa, Artificial Sequence
  source: /note="Description of Artificial Sequence: Synthetic polypeptide"
MAADGYLPDWLEDTLSEGIRQWWKLKPGPPPPKPAERHKDDSRGLVLPGYKYLGPFNGLDKGEPVNEADAAALEHDKAYDQQLKAGDNPYLKYNHADAEFQQRLQGDTSFGGNLGRAVFQAKKRVLEPLGLVEQAGETAPGKKRPLIESPQQPDSSTGIGKKGKQPAKKRLNFGQTGDSESVPDPQPLGEPPATPAAVGPTTMASGGGAPMADNNEGADGVGNASGNWHCDSTWLGDRVITTSTRTWALPTYNNHLYKQISSASTGASNDNHYFGYSTPWGYFDFNRFHCHFSPRDWQRLINNNWGFRPKRLNFKLFNIQVKEVTTNDGVTTIANNLTSTVQVFSDSDYQLPYVLGSAHEGCLPPFPADVFMVPQYGYLTLNNGSQAVGRSSFYCLEYFPSQMLRTGNNFTFSYTFEDVPFHSSYAHSQSLDRLMNPLIDQYLYYLNRTQNQSGSAQNKDLLFSRGSPAGMSVQPKNWLPGPCYRQQRVSKTKTDNNNSNFTWTGASKYNLNGRESIINPGTAMASHKDDKDKFFPMSGVMIFGKESAGASNTALDNVMITDEEEIKATNPVATERFGTVAVNLQSSSTDPATGDVHVMGALPGMVWQDRDVYLQGPIWAKIPHTDGHFHPSPLMGGFGLKNPPPQILIKNTPVPANPPAEFSATKFASFITQYSTGQVSVEIEWELQKENSKRWNPEVQYTSNYAKSANVDFTVDNNGLYTEPRPIGTRYLTRPL

SEQ ID NO: 557 - DNA, 2211 bp, Artificial Sequence
  source: /note="Description of Artificial Sequence: Synthetic polynucleotide"
atggcttccgatggttatcttccagattggctcgaggacaacctctctgagggcatccgcgagtggtgggacttgaaacctggagccccgaaacccaaagccaaccagcaaaagcaggacgacggccggggtctggtgcttcctggctacaagtacctcggacccttcaacggactcgacaagggggagcccgtcaacgcggcggatgcagcggccctcgagcacgacaaggcctacgaccagcagctcagagcgggtgacaatccgtacctgcggtataaccacgccgacgccgagtttcaggagcgtctgcaagaagatacgtcttttgggggcaacctcgggcgagcagtcttccaggccaagaagagggttctcgaaccttttggtctggttgaggaaggtgctaagacggctcctggaaagaaacgtccggtagagcagtcgccacaagagccagactcctcctcgggcattggcaagacaggccagcagcccgctaaaaagagactcaattttggtcagactggcgactcagagtcagtccccgacccacaacctctcggagaacctccagcaacccccgctgctgtgggacctactacaatggcttcaggcggtggcgcaccaatggcagacaataacgaaggcgccgacggagtgggtaatgcctcaggaaattggcattgcgattccacatggctgggcgacagagtcatcaccaccagcacccgaacatgggccttgcccacctataacaaccacctctacaagcaaatctccagtgcttcaacgggggccagcaacgacaaccactacttcggctacagcaccccctgggggtattttgatttcaacagattccactgccatttctcaccacgtgactggcagcgactcatcaacaacaattggggattccggcccaagagactcaacttcaaactcttcaacatccaagtcaaggaggtcacgacgaatgatggcgtcacaaccatcgctaataaccttaccagcacggttcaagtcttctcggactcggagtaccagcttccgtacgtcctcggctctgcgcaccagggctgcctccctccgttcccggcggacgtgttcatgattccgcagtacggctacctaacgctcaacaatggcagccaggcagtgggacggtcatccttttactgcctggaatatttcccatcgcagatgctgagaacgggcaataactttaccttcagctacaccttcgaggacgtgcctttccacagcagctacgcgcacagccagagcctggaccggctgatgaatcctctcatcgaccagtacctgtattacctgaacagaactcagaatcagtccggaagtgcccaaaacaaggacttgctgtttagccgggggtctccagctggcatgtctgttcagcccaaaaactggctacctggaccctgttaccggcagcagcgcgtttctaaaacaaaaacagacaacaacaacagcaactttacctggactggtgcttcaaaatataaccttaatgggcgtgaatctataatcaaccctggcactgctatggcctcacacaaagacgacaaagacaagttctttcccatgagcggtgtcatgatttttggaaaggagagcgccggagcttcaaacactgcattggacaatgtcatgatcacagacgaagaggaaatcaaagccactaaccccgtggccaccgaaagatttgggactgtggcagtcaatctccagagcagcagcacagaccctgcgaccggagatgtgcatgttatgggagccttacctggaatggtgtggcaagacagagacgtatacctgcagggtcccatttgggccaaaattcctcacacagatggacactttcacccgtctcctcttatgggcggctttggacttaagcacccgcctcctcagatcctcatcaaaaacacgcctgttcctgcgaatcctccggcagagttttcggctacaaagtttgcttcattcatcacccagtattctactggccaagtcagcgtggagattgaatgggagctgcagaaagaaaacagcaaacgctggaatcccgaagtgcagtatacatctaactatgcaaaatctgccaacgttgatttcactgtggacaacaatggactttatactgagcctcgtcccattggcacccgttacctcacccgtcccctgtaa

SEQ ID NO: 558 - protein, 736 aa, Artificial Sequence
  source: /note="Description of Artificial Sequence: Synthetic polypeptide"
MASDGYLPDWLEDNLSEGIREWWDLKPGAPKPKANQQKQDDGRGLVLPGYKYLGPFNGLDKGEPVNAADAAALEHDKAYDQQLRAGDNPYLRYNHADAEFQERLQEDTSFGGNLGRAVFQAKKRVLEPFGLVEEGAKTAPGKKRPVEQSPQEPDSSSGIGKTGQQPAKKRLNFGQTGDSESVPDPQPLGEPPATPAAVGPTTMASGGGAPMADNNEGADGVGNASGNWHCDSTWLGDRVITTSTRTWALPTYNNHLYKQISSASTGASNDNHYFGYSTPWGYFDFNRFHCHFSPRDWQRLINNNWGFRPKRLNFKLFNIQVKEVTTNDGVTTIANNLTSTVQVFSDSEYQLPYVLGSAHQGCLPPFPADVFMIPQYGYLTLNNGSQAVGRSSFYCLEYFPSQMLRTGNNFTFSYTFEDVPFHSSYAHSQSLDRLMNPLIDQYLYYLNRTQNQSGSAQNKDLLFSRGSPAGMSVQPKNWLPGPCYRQQRVSKTKTDNNNSNFTWTGASKYNLNGRESIINPGTAMASHKDDKDKFFPMSGVMIFGKESAGASNTALDNVMITDEEEIKATNPVATERFGTVAVNLQSSSTDPATGDVHVMGALPGMVWQDRDVYLQGPIWAKIPHTDGHFHPSPLMGGFGLKHPPPQILIKNTPVPANPPAEFSATKFASFITQYSTGQVSVEIEWELQKENSKRWNPEVQYTSNYAKSANVDFTVDNNGLYTEPRPIGTRYLTRPL

SEQ ID NO: 559 - DNA, 2211 bp, Artificial Sequence
  source: /note="Description of Artificial Sequence: Synthetic polynucleotide"
atggctgctgatggttatcttccagattggctcgaggacactctctctgaaggaataagacagtggtggaagctcaaacctggcccaccaccaccaaagcccgcagagcggcataaggacgacagcaggggtcttgtgcttcctgggtacaagtacctcggacccttcaacggactcgacaagggagagccggtcaacgaggcagacgcagcggccctcgagcacgacaaggcctacgaccagcagctcaaggccggtgacaacccctacctcaagtacaaccacgccgacgcggagttccagcagcggcttcagggcgacacatcgtttgggggcaacctcggcagagcagtcttccaggccaaaaagagggttcttgaacctcttggtctggttgagcaagcgggtgagacggctcctggaaagaagagaccgttgattgaatccccccagcagcccgactcctccacgggtatcggcaaaaaaggcaagcagccggctaaaaagagactcaattttggtcagactggcgactcagagtcagtccccgacccacaacctctcggagaacctccagcaacccccgctgctgtgggacctactacaatggcttcaggtggtggcgcaccaatggcagacaataacgaaggcgccgacggagtgggtaatgcctcaggaaattggcattgcgattccacatggctgggcgacagagtcatcaccaccagcacccgcacctgggccttgcccacctacaataaccacctctacaagcaaatctccagtgcttcaacgggggccagcaacgacaaccactacttcggctacagcaccccctgggggtattttgacttcaacagattccactgccacttttcaccacgtgactggcagcgactcatcaacaacaattggggattccggcccaagagactcaacttcaaactcttcaacatccaagtcaaggaggtcacgacgaatgatggcgtcacaaccatcgctaataaccttaccagcacggttcaagtcttctcggactcagactatcagctcccgtacgtgctcgggtcggctcacgagggctgcctcccgccgttcccagcagacgtcttcatggtgccacagtatggatacctcaccctgaacaacgggagtcaggcagtaggacgctcttcattttactgcctggagtactttccttctcagatgctgcgtaccggaaacaactttaccttcagctacacttttgaggacgttcctttccacagcagctacgctcacagccagagtctggaccgtctcatgaatcctctcatcgaccagtacctgtattacctgaacagaactcagaatcagtccggaagtgcccaaaacaaggacttgctgtttagccgggggtctccaactggcatgtctgttcagcccaaaaactggctacctggaccctgttatcggcagcagcgcgtttctaaaacaaaaacagacaacaacaacagcaactttacctggactggtgcttcaaaatataaccttaatgggcgtgaatctataatcaaccctggcactgctatggcctcacacaaagacgacaaagacaagttctttcccatgagcggtgtcatgatttttggaaaggagagcgccggagcttcaaacactgcattggacaatgtcatgatcacagacgaagaggaaatcaaagccactaaccccgtggccactgaaagatttgggactgtggcagtcaatctccagagcagcagcacagaccctgcgaccggagatgtgcatgccatgggagccttacctggaatggtgtggcaagacagagacgtatacctgcagggtcctatttgggccaaaattcctcacacggatggacactttcacccgtctcctctcatgggcggctttggactcaagaacccgcctcctcagatcctcatcaaaaacacgcctgttcctgcgaatcctccggcggagttttcagctacaaagtttgcttcattcatcacccagtattccacaggacaagtgagcgtggagattgaatgggagctgcagaaagaaaacagcaaacgctggaatcccgaagtgcagtatacatctaactatgcaaaatctgccaacgttgatttcactgtggacaacaatggactttatactgagcctcgccccattggcacccgttacctcacccgtcccctgtaa

SEQ ID NO: 560 - protein, 736 aa, Artificial Sequence
  source: /note="Description of Artificial Sequence: Synthetic polypeptide"
MAADGYLPDWLEDTLSEGIRQWWKLKPGPPPPKPAERHKDDSRGLVLPGYKYLGPFNGLDKGEPVNEADAAALEHDKAYDQQLKAGDNPYLKYNHADAEFQQRLQGDTSFGGNLGRAVFQAKKRVLEPLGLVEQAGETAPGKKRPLIESPQQPDSSTGIGKKGKQPAKKRLNFGQTGDSESVPDPQPLGEPPATPAAVGPTTMASGGGAPMADNNEGADGVGNASGNWHCDSTWLGDRVITTSTRTWALPTYNNHLYKQISSASTGASNDNHYFGYSTPWGYFDFNRFHCHFSPRDWQRLINNNWGFRPKRLNFKLFNIQVKEVTTNDGVTTIANNLTSTVQVFSDSDYQLPYVLGSAHEGCLPPFPADVFMVPQYGYLTLNNGSQAVGRSSFYCLEYFPSQMLRTGNNFTFSYTFEDVPFHSSYAHSQSLDRLMNPLIDQYLYYLNRTQNQSGSAQNKDLLFSRGSPTGMSVQPKNWLPGPCYRQQRVSKTKTDNNNSNFTWTGASKYNLNGRESIINPGTAMASHKDDKDKFFPMSGVMIFGKESAGASNTALDNVMITDEEEIKATNPVATERFGTVAVNLQSSSTDPATGDVHAMGALPGMVWQDRDVYLQGPIWAKIPHTDGHFHPSPLMGGFGLKNPPPQILIKNTPVPANPPAEFSATKFASFITQYSTGQVSVEIEWELQKENSKRWNPEVQYTSNYAKSANVDFTVDNNGLYTEPRPIGTRYLTRPL

SEQ ID NO: 561 - DNA, 2211 bp, Artificial Sequence
  source: /note="Description of Artificial Sequence: Synthetic polynucleotide"
atggctgccgatggttatcttccagattggctcgaggacaacctctctgagggcattcgcgagtggtgggcgctgaaacctggagccccgaagcccaaagccaaccagcaaaagcaggacgacggccggggtctggtgcttcctggctacaagtacctcggacccttcaacggactcgacaagggggagcccgtcaacgcggcggatgcagcggccctcgagcacgacaaggcctacgaccagcagctcaaagcgggtgacaatccgtacctgcggtataaccacgccgacgccgagtttcaggagcgtctgcaagaagatacgtcttttgggggcaacctcgggcgagcagtcttccaggccaagaagcgggttctcgaacctctcggtctggttgaggaaggcgctaagacggctcctggaaagaaacgtccggtagagcaatcgccacaagagccagactcctcctcgggcatcggcaagacaggccagcagcccgctaaaaagagactcaattttggtcagactggcgactcagagtcagtccccgacccacaacctctcggagaacctccagcaacccccgctgctgtgggacctactacaatggcttcaggcggtggcgcaccaatggcagacaataacgaaggcgccgacggagtgggtaatgcctcaggaaattggcattgcgattccacatggctgggcgacagagtcatcaccaccagcacccgaacatgggccttgcccacctataacaaccacctctacaagcaaatctccagtgcttcgacgggggccagcaacgacaaccactacttcggctacagcaccccctgggggtattttgactttaacagattccactgccacttttcaccacgtgactggcagcgactcatcaacaacaactggggattccggcccaagagactcagcttcaagctcttcaacatccaggtcaaggaggtcacgacgaatgatggcgtcacaaccatcgctaataaccttaccagcacggttcaagtcttctcggactcggagtaccagcttccgtacgtcctcggctctgcgcaccagggctgcctccctccgttcccggcggacgtgttcatgattccgcaatacggctacctgacgctcaacaatggcagccaagccgtgggacgttcatccttttactgcctggaatatttcccttctcagatgctgagaacgggcaacaactttaccttcagctacacctttgaggaagtgcctttccacagcagctacgcgcacagccagagcctggaccggctgatgaatcctctcatcgatcaatacctgtattacctgaacagaactcaaaatcagtccggaagtgcccaaaacaaggacttgctgtttagccgtgggtctccagctggcatgtctgttcagcccaaaaactggctacctggaccctgttatcggcagcagcgcgtttctaaaacaaaaacagacaacaacaacagcaattttacctggactggtgcttcaaaatataacctcaatgggcgtgaatccatcatcaaccctggcactgctatggcctcacataaagacgacgaagacaagttctttcccatgagcggtgtcatgatttttggaaaagagagcgccggagcttcaaacactgcattggacaatgtcatgattacagacgaagaggaaattaaagccactaaccctgtggccaccgaaagatttgggaccgtggcagtcaatttccagagcagcagcacagaccctgcgaccggagatgtgcatgctatgggagcattacctggcatggtgtggcaagatagagacgtgtacctgcagggtcccatttgggccaaaattcctcacacagatggacactttcacccgtctcctcttatgggcggctttggactcaagaacccgcctcctcagatcctcatcaaaaacacgcctgttcctgcgaatcctccggcggagttttcagctacaaagtttgcttcattcatcacccaatactccacaggacaagtgagcgtggagattgaatgggagctgcagaaagaaaacagcaaacgctggaatcccgaagtgcagtatacatctaactatgcaaaatctgccaacattgatttcactgtggacaacaatggactttatactgagcctcgccccattggcacccgttacctcacccgtccccagtaa

SEQ ID NO: 562 - protein, 736 aa, Artificial Sequence
  source: /note="Description of Artificial Sequence: Synthetic polypeptide"
MAADGYLPDWLEDNLSEGIREWWALKPGAPKPKANQQKQDDGRGLVLPGYKYLGPFNGLDKGEPVNAADAAALEHDKAYDQQLKAGDNPYLRYNHADAEFQERLQEDTSFGGNLGRAVFQAKKRVLEPLGLVEEGAKTAPGKKRPVEQSPQEPDSSSGIGKTGQQPAKKRLNFGQTGDSESVPDPQPLGEPPATPAAVGPTTMASGGGAPMADNNEGADGVGNASGNWHCDSTWLGDRVITTSTRTWALPTYNNHLYKQISSASTGASNDNHYFGYSTPWGYFDFNRFHCHFSPRDWQRLINNNWGFRPKRLSFKLFNIQVKEVTTNDGVTTIANNLTSTVQVFSDSEYQLPYVLGSAHQGCLPPFPADVFMIPQYGYLTLNNGSQAVGRSSFYCLEYFPSQMLRTGNNFTFSYTFEEVPFHSSYAHSQSLDRLMNPLIDQYLYYLNRTQNQSGSAQNKDLLFSRGSPAGMSVQPKNWLPGPCYRQQRVSKTKTDNNNSNFTWTGASKYNLNGRESIINPGTAMASHKDDEDKFFPMSGVMIFGKESAGASNTALDNVMITDEEEIKATNPVATERFGTVAVNFQSSSTDPATGDVHAMGALPGMVWQDRDVYLQGPIWAKIPHTDGHFHPSPLMGGFGLKNPPPQILIKNTPVPANPPAEFSATKFASFITQYSTGQVSVEIEWELQKENSKRWNPEVQYTSNYAKSANIDFTVDNNGLYTEPRPIGTRYLTRPQ

SEQ ID NO: 563 - DNA, 2211 bp, Artificial Sequence
  source: /note="Description of Artificial Sequence: Synthetic polynucleotide"
atggctgccgatggttatcttccagattggctcgaggacaacctctctgagggcattcgcgagtggtgggacttgaaacctggagccccgaaacccaaagccaaccagcaaaagcaggacgacggccggggtctggtgcttcctggctacaagtacctcggacccttcaacggactcgacaagggggagcccgtcaacgcggcggatgcagcggccctcgagcacgacaaggcctacgaccagcagctcaaagcgggtgacaatccgtaccttcggtataaccacgccgacgccgagtttcaggagcgtctgcaagaagatacgtcttttgggggcaacctcgggcgagcagtcttccaggccaaaaagagggttctcgaacctctcggtctggttgaggaagcggctaagacggctcctggaaagaaacgtccggtagagcagtcgccacaagagccagactcctcctcgggcattggcaagacaggccagcagcccgctaaaaagagactcaattttggtcagactggcgactcagagtcagtccccgacccacaacctctcggagaacctcccgcagccccctcaggtgtgggatctcttacaatggcttcaggtggtggcgcaccaatggcagacaataacgaaggcgccgacggagtgggtaatgcctcaggaaattggcattgcgattccacatggctgggcgacagagtcatcaccaccagcacccgcacctgggccttgcccacctacaataaccacctctacaagcaaatctccagtgcttcaacgggggccagcaacgacaaccactacttcggctacagcaccccctgggggtattttgacttcaacagattccactgccacttttcaccacgtgactggcaaagactcatcaacaacaattggggattccggcccaagagactcaacttcaagctcttcaacatccaagtcaaggaggtcacgacgaatgatggcgtcacgaccatcgctaataaccttaccagcacggttcaagtcttctcggactcggagtaccagttgccgtacgtcctcggctctgcgcaccagggctgcctccctccgttcccggcggacgtgttcatgattccgcagtacggctacctaacgctcaacaatggcagccaggcagtgggacggtcatccttttactgcctggaatatttcccatcgcagatgctgagaacgggcaacaactttaccttcagctacacctttgaggaagtgcctttccacagcagctacgcgcacagccagagcctggaccggctgatgaatcctctcatcgaccagtacctgtattacctgaacagaactcaaaatcagtccggaagtgcccaaaacaaggacttgctgtttagccgtgggtctccagctggcatgtctgttcagcccaaaaactggctacctggaccctgttaccggcagcagtgcgtttctaaaacaaaaacagacaacaacaacagcaactttacctggactggtgcttcaaaatataaccttaatgggcgtgaatctataatcaaccctggcactgctatggcctcacacaaagacgacaaagacaagttctttcccatgagcggtgtcatgatttttggaaaggagagcgccggagcttcaaacactgcattggacaatgtcatgatcacagacgaagaggaaatcaaagccactaaccccgtggccaccgaaagatttgggactgtggcagtcaatctccagagcagcagcacagaccctgcgaccggagatgtgcatgttatgggagccttacctggaatggtgtggcaagacagagacgtatacctgcagggtcctatttgggccaaaattcctcacacagatggacactttcacccgtctcctcttatgggcggctttggactcaagaacccgcctcctcagatcctcatcaaaaacacgcctgttcctgcgaatcctccggcggagttttcagctacaaagtttgcttcattcatcacccaatactccacaggacaagtgagcgtggagattgaatgggagctgcagaaagaaaacagcaagcgctggaatcccgaagtgcagtacacatccaattatgcaaaatctgccaacgttgatttcactgtggacaacaatggactttatactgagcctcgccccattggcacccgttacctcacccgtcccctgtaa

SEQ ID NO: 564 - protein, 736 aa, Artificial Sequence
  source: /note="Description of Artificial Sequence: Synthetic polypeptide"
MAADGYLPDWLEDNLSEGIREWWDLKPGAPKPKANQQKQDDGRGLVLPGYKYLGPFNGLDKGEPVNAADAAALEHDKAYDQQLKAGDNPYLRYNHADAEFQERLQEDTSFGGNLGRAVFQAKKRVLEPLGLVEEAAKTAPGKKRPVEQSPQEPDSSSGIGKTGQQPAKKRLNFGQTGDSESVPDPQPLGEPPAAPSGVGSLTMASGGGAPMADNNEGADGVGNASGNWHCDSTWLGDRVITTSTRTWALPTYNNHLYKQISSASTGASNDNHYFGYSTPWGYFDFNRFHCHFSPRDWQRLINNNWGFRPKRLNFKLFNIQVKEVTTNDGVTTIANNLTSTVQVFSDSEYQLPYVLGSAHQGCLPPFPADVFMIPQYGYLTLNNGSQAVGRSSFYCLEYFPSQMLRTGNNFTFSYTFEEVPFHSSYAHSQSLDRLMNPLIDQYLYYLNRTQNQSGSAQNKDLLFSRGSPAGMSVQPKNWLPGPCYRQQCVSKTKTDNNNSNFTWTGASKYNLNGRESIINPGTAMASHKDDKDKFFPMSGVMIFGKESAGASNTALDNVMITDEEEIKATNPVATERFGTVAVNLQSSSTDPATGDVHVMGALPGMVWQDRDVYLQGPIWAKIPHTDGHFHPSPLMGGFGLKNPPPQILIKNTPVPANPPAEFSATKFASFITQYSTGQVSVEIEWELQKENSKRWNPEVQYTSNYAKSANVDFTVDNNGLYTEPRPIGTRYLTRPL

SEQ ID NO: 565 - DNA, 2211 bp, Artificial Sequence
  source: /note="Description of Artificial Sequence: Synthetic polynucleotide"
atggctgccgatggttatcttccagattggctcgaggacaacctctctgagggcattcgcgaatggtgggacttgaaacctggagccccgaaacccaaagtcaaccagcaaaagcaggacaacgctcggggtcttgtgcttccgggttacaaatacctcggacccttcaacggactcgacaagggggagcccgtcaacgcggcggacgcagcggccctcgagcacgacaaggcctacgaccagcagctcaaagcgggtgacaatccgtaccttcggtataaccacgccgacgccgagtttcaggagcgtctgcaagaagatacgtcttttgggggcaaccttggacgagcagtcttccaggccaagaagagggttctcgaaccttttggtctggttgaggaaggtgctaagacggctcctggaaagaaacgtccggtagagcagtcgccacaagagccagactcctcctcgggcattggcaagacaggccagcagcccgctaaaaagagactcaattttggtcagactggcgactcagagtcagtccccgacccacaacctctcggagaacctccagcaacccccgctgctgtgggacctactacaatggcttcaggcggtggcgcaccaatggcagacaataacgaaggcgccgacggagtgggtaatgcctcaggaaattggcattgcgattccacatggctgggcgacagagtcatcaccaccagcacccgcacctgggccttgcccacctacaataaccacctctacaagcaaatctccagtgcttcaacgggggccagcaacgacaaccactacttcggctacagcaccccctgggggtattttgacttcaacagattccactgccacttttcaccacgtgactggcaaagactcatcaacaacaattggggattccggcccaagagactcaacttcaagctcttcaacatccaagtcaaggaggtcacgacgaatgatggcgtcacgaccatcgctaataaccttaccagcacggttcaagtcttctcggactcggagtaccagttgccgtacgtcctcggctctgcgcaccagggctgcctccctccgttcccggcggacgtgttcatgattccgcaatacggctacctgacgctcaacaatggcagccaggcagtgggacggtcatccttttactgcctggaatatttcccatcgcagatgctgagaacgggcaataactttaccttcagctacacttttgaggacgttcctttccacagcagctacgctcacagccagagcctggaccggctgatgaatcctctcatcgaccagtacctgtattacctgaacagaactcagaatcagtccggaagtgcccaaaacaaggacttgctgtttagccgtgggtctccaactggcatgtctgttcagcccaaaaactggctacctggaccctgttatcggcagcagcgcgtttctaaaacaaaaacagacaacaacaacagcaactttacctggactggtgcttcaaaatataaccttaatgggcgtgaatctataatcaaccctggcactgctatggcctcacacaaagacgacgaagacaagttctttcccatgagcggtgtcatgatttttggaaaggagagcgccggagcttcaaacactgcattggacaatgtcatgatcacagacgaagaggaaatcaaagccactaaccccgtggccactgaaagatttgggactgtggcagtcaatctccagagcagcagcacagaccctgcgaccggagatgtgcatgccatgggagccttacctggaatggtgtggcaagacagagacgtatacctgcagggtcctatttgggccaaaattcctcacacggatggacactttcacccgtctcctctcatgggcggctttggacttaagcacccgcctcctcagatcctcatcaaaaacacgcctgttcctgcgaatcctccggcagagttttcggctacaaagtttgcttcattcatcacccagtattccacaggacaagtgagcgtggagattgaatgggagctgcagaaagaaaacagcaaacgctggaatcccgaagtgcagtatacatctaactatgcaaaatctgccaacgttgatttcactgtggacaacaatggactttatactgagcctcgccccattggcacccgttacctcacccgtcccctgtaa

SEQ ID NO: 566 - protein, 736 aa, Artificial Sequence
  source: /note="Description of Artificial Sequence: Synthetic polypeptide"
MAADGYLPDWLEDNLSEGIREWWDLKPGAPKPKVNQQKQDNARGLVLPGYKYLGPFNGLDKGEPVNAADAAALEHDKAYDQQLKAGDNPYLRYNHADAEFQERLQEDTSFGGNLGRAVFQAKKRVLEPFGLVEEGAKTAPGKKRPVEQSPQEPDSSSGIGKTGQQPAKKRLNFGQTGDSESVPDPQPLGEPPATPAAVGPTTMASGGGAPMADNNEGADGVGNASGNWHCDSTWLGDRVITTSTRTWALPTYNNHLYKQISSASTGASNDNHYFGYSTPWGYFDFNRFHCHFSPRDWQRLINNNWGFRPKRLNFKLFNIQVKEVTTNDGVTTIANNLTSTVQVFSDSEYQLPYVLGSAHQGCLPPFPADVFMIPQYGYLTLNNGSQAVGRSSFYCLEYFPSQMLRTGNNFTFSYTFEDVPFHSSYAHSQSLDRLMNPLIDQYLYYLNRTQNQSGSAQNKDLLFSRGSPTGMSVQPKNWLPGPCYRQQRVSKTKTDNNNSNFTWTGASKYNLNGRESIINPGTAMASHKDDEDKFFPMSGVMIFGKESAGASNTALDNVMITDEEEIKATNPVATERFGTVAVNLQSSSTDPATGDVHAMGALPGMVWQDRDVYLQGPIWAKIPHTDGHFHPSPLMGGFGLKHPPPQILIKNTPVPANPPAEFSATKFASFITQYSTGQVSVEIEWELQKENSKRWNPEVQYTSNYAKSANVDFTVDNNGLYTEPRPIGTRYLTRPL

SEQ ID NO: 567 - DNA, 2208 bp, Artificial Sequence
  source: /note="Description of Artificial Sequence: Synthetic polynucleotide"
  modified_base (955)..(955): a, c, g, or t
  modified_base (971)..(972): a, c, g, or t
  modified_base (981)..(981): a, c, g, or t
  modified_base (986)..(986): a, c, g, or t
  modified_base (1235)..(1235): a, c, g, or t
  modified_base (1694)..(1696): a, c, g, or t
  modified_base (1698)..(1698): a, c, g, or t
  modified_base (1763)..(1765): a, c, g, or t
  modified_base (1778)..(1778): a, c, g, or t
  modified_base (2204)..(2204): a, c, g, or t
atggctgccgatggttatcttccagattggctcgaggacaacctctctgagggcattcgcgaatggtgggacttgaaacctggagccccgaaacccaaagtcaaccagcaaaagcaggacaacgctcggggtcttgtgcttccgggttacaaatacctcggacccttcaacggactcgacaagggggagcccgtcaacgcggcggacgcagcggccctcgagcacgacaaggcctacgaccagcagctcaaagcgggtgacaatccgtaccttcggtataaccacgccgacgccgagtttcaggagcgtctgcaagaagatacgtcttttgggggcaaccttggacgagcagtcttccaggccaagaagagggttctcgaaccttttggtctggttgaggaaggtgctaagacggctcctggaaagaaacgtccggtagagcagtcgccacaagagccagactcctcctcgggcattggcaagacaggccagcagcccgctaaaaagagactcaattttggtcagactggcgactcagagtcagtccccgacccacaacctctcggagaacctccagcaacccccgctgctgtgggacctactacaatggcttcaggcggtggcgcaccaatggcagacaataacgaaggcgccgacggagtgggtaatgcctcaggaaattggcattgcgattccacatggctgggcgacagagtcatcaccaccagcacccgaacatgggccttgcccacctataacaaccacctctacaagcaaatctccagtgcttcaacgggggccagcaacgacaaccactacttcggctacagcaccccctgggggtattttgatttcaacagattccactgccacttttcaccacgtgactggcagcgactcatcaataacaattggggattccggcccaagagactcaacttcaaactcttcaacntccaagtcaaggaggnnacgacgaangatgncgtcacaaccatcgctaataaccttaccagcacggttcaagtcttctcggactcggagtaccagcttccgtacgtcctcggctctgcgcaccagggctgcctccctccgttcccggcggacgtgttcatgattccgcaatacggctacctgacgctcaacaatggcagccaggcagtgggacggtcatccttttactgcctggaatatttcccatcgcagatgctgagaacgggcaataactttacctncagctacacttttgaggacgttcctttccacagcagctacgctcacagccagagcctggaccggctgatgaatcctctcatcgaccagtacctgtattacctgaacagaactcagaatcagtccggaagtgcccaaaacaaggacttgctgtttagccgtgggtctccaactggcatgtctgttcagcccaaaaactggctacctggaccctgttatcggcagcagcgcgtttctaaaacaaaaacagacaacaacaacagcaactttacctggactggtgcttcaaaatataaccttaatgggcgtgaatctataatcaaccctggcactgctatggcctcacacaaagacgacgaagacaagttctttcccatgagcggtgtcatgatttttggaaaggagagcgccggagcttcaaacactgcattggacaatgtcatgatcacagacgaagagannncnaagccactaaccccgtggccactgaaagatttgggactgtggcagtcaatctccaagcagcacannnaccctgcgaccgnagatgtgcatgccatgggagccttacctggaatggtgtggcaagacagagacgtatacctgcagggtcctatttgggccaaaattcctcacacggatggacactttcacccgtctcctctcatgggcggctttggacttaagcacccgcctcctcagatcctcatcaaaaacacgcctgttcctgcgaatcctccggcagagttttcggctacaaagtttgcttcattcatcacccagtattccacaggacaagtgagcgtggagattgaatgggagctgcagaaagaaaacagcaaacgctggaatcccgaagtgcagtatacatctaactatgcaaaatctgccaacgttgatttcactgtggacaacaatggactttatactgagcctcgccccattggcacccgttacctcacccgtccccngtaa

SEQ ID NO: 568 - protein, 723 aa, Artificial Sequence
  source: /note="Description of Artificial Sequence: Synthetic polypeptide"
MAADGYLPDWLEDNLSEGIREWWDLKPGAPKPKVNQQKQDNARGLVLPGYKYLGPFNGLDKGEPVNAADAAALEHDKAYDQQLKAGDNPYLRYNHADAEFQERLQEDTSFGGNLGRAVFQAKKRVLEPFGLVEEGAKTAPGKKRPVEQSPQEPDSSSGIGKTGQQPAKKRLNFGQTGDSESVPDPQPLGEPPATPAAVGPTTMASGGGAPMADNNEGADGVGNASGNWHCDSTWLGDRVITTSTRTWALPTYNNHLYKQISSASTGASNDNHYFGYSTPWGYFDFNRFHCHFSPRDWQRLINNNWGFRPKRLNFKLFNQVKETTDVTTIANNLTSTVQVFSDSEYQLPYVLGSAHQGCLPPFPADVFMIPQYGYLTLNNGSQAVGRSSFYCLEYFPSQMLRTGNNFTSYTFEDVPFHSSYAHSQSLDRLMNPLIDQYLYYLNRTQNQSGSAQNKDLLFSRGSPTGMSVQPKNWLPGPCYRQQRVSKTKTDNNNSNFTWTGASKYNLNGRESIINPGTAMASHKDDEDKFFPMSGVMIFGKESAGASNTALDNVMITDEEATNPVATERFGTVAVNLQSSPATDVHAMGALPGMVWQDRDVYLQGPIWAKIPHTDGHFHPSPLMGGFGLKHPPPQILIKNTPVPANPPAEFSATKFASFITQYSTGQVSVEIEWELQKENSKRWNPEVQYTSNYAKSANVDFTVDNNGLYTEPRPIGTRYLTRP

SEQ ID NO: 569 - DNA, 2208 bp, Artificial Sequence
  source: /note="Description of Artificial Sequence: Synthetic polynucleotide"
atggctgccgatggttatcttccagattggctcgaggacactctctctgaaggaataagacagtggtggaagctcaaacctggcccaccaccaccaaagcccgcagagcggcataaggacgacagcaggggtcttgtgcttcctgggtacaagtacctcggacccttcaacggactcgacaagggagagccggtcaacgaggcagacgccgcggccctcgagcacgacaaagcctatgaccggcagctcgacagcggagacaacccgtacctcaagtacaaccacgccgacgcggagtttcaggagcgccttaaagaagatacgtcttttgggggcaacctcggacgagcagtcttccaggcgaaaaagagggttcttgaacctctgggcctggttgaggaacctgttaagacggctccgggaaaaaagaggccggtagagcactctcctgtggagccagactcctcctcgggaaccggaaaggcgggtcagcagcctgcaagaaaaagattgaattttggtcagactggagacgcagactcagtacctgacccccagcctctcggacagccaccagcagccccctctggtctgggaactaatacgatggctacaggcagtggcgcaccaatggcagacaataacgagggcgccgacggagtgggtaattcctcgggaaattggcattgcgattccacatggatgggcgacagagtcatcaccaccagcacccgaacctgggccctgcccacctacaacaaccacctctacaaacaaatttccagccaatcaggagcctcgaacgacaatcactactttggctacagcaccccttgggggtattttgacttcaacagattccactgccacttttcaccacgtgactggcaaagactcatcaacaacaactggggattccgacccaagagactcaagttcaagctctttaacattcaagtcaaagaggtcacgcagaatgacggtacgacgacgattgccaataaccttaccagcacggttcaggtgtttactgactcggagtaccagctcccgtacgtcctcggctcggcgcatcaaggatgcctcccgccgttcccagcagacgtcttcatggtgccacagtatggatacctcaccctgaacaacgggagtcaggcagtaggacgctcttcattttactgcctggagtactttccttctcagatgctgcgtaccggtaacaactttaccttcagctacacttttgaggacgttcctttccacagcagctacgctcacagccagagtctggaccgtctcatgaatcctctcatcgaccagtacctgtattacttgagcagaacagacgctccaagtggaaccaccacgcagtcaaggcttcagttttctcaggccggagcgagtgacattcgggaccagtctaggaactggcttcctggaccctgttaccgccagcagcgagtatcaaagacatctgcggataacaacaacagtgaatactcgtggactggagctaccaagtaccacctcaatggcagagactctctggtgaatccgggcccggccatggcaagccacaaggacgatgaagaaaagttttttcctcagagcggggttctcatctttgggaagcaaggctcagagaaaacaagtgtggacattgaaaaggtcatgattacagacgaagaggaaatcaggacaaccaatcccgtggctacggagcagtatggttctgtatctaccaacctccagagaggcaacagacaagcagctaccgcagatgtcaacacacaaggcgttcttccaggcatggtctggcaggacagagatgtgtaccttcaggggcccatctgggcaaagattccacacacggacggacattttcacccctctcccctcatgggtggattcggacttaaacaccctcctccacagattctcatcaagaacaccccggtacctgcgaatccttcgaccaccttcagtgcggcaaagtttgcttccttcatcacacagtactccacgggacaggtcagcgtggagatcgagtgggagctgcagaaggaaaacagcaaacgctggaatcccgaagttcagtacacttccaactacaacaagtctgttaatgtggactttactgtggacactaatggcgtgtattcagagcctcgccccattggcaccagatacctgactcgtaatctgtaa

SEQ ID NO: 570 - protein, 735 aa, Artificial Sequence
  source: /note="Description of Artificial Sequence: Synthetic polypeptide"
MAADGYLPDWLEDTLSEGIRQWWKLKPGPPPPKPAERHKDDSRGLVLPGYKYLGPFNGLDKGEPVNEADAAALEHDKAYDRQLDSGDNPYLKYNHADAEFQERLKEDTSFGGNLGRAVFQAKKRVLEPLGLVEEPVKTAPGKKRPVEHSPVEPDSSSGTGKAGQQPARKRLNFGQTGDADSVPDPQPLGQPPAAPSGLGTNTMATGSGAPMADNNEGADGVGNSSGNWHCDSTWMGDRVITTSTRTWALPTYNNHLYKQISSQSGASNDNHYFGYSTPWGYFDFNRFHCHFSPRDWQRLINNNWGFRPKRLKFKLFNIQVKEVTQNDGTTTIANNLTSTVQVFTDSEYQLPYVLGSAHQGCLPPFPADVFMVPQYGYLTLNNGSQAVGRSSFYCLEYFPSQMLRTGNNFTFSYTFEDVPFHSSYAHSQSLDRLMNPLIDQYLYYLSRTDAPSGTTTQSRLQFSQAGASDIRDQSRNWLPGPCYRQQRVSKTSADNNNSEYSWTGATKYHLNGRDSLVNPGPAMASHKDDEEKFFPQSGVLIFGKQGSEKTSVDIEKVMITDEEEIRTTNPVATEQYGSVSTNLQRGNRQAATADVNTQGVLPGMVWQDRDVYLQGPIWAKIPHTDGHFHPSPLMGGFGLKHPPPQILIKNTPVPANPSTTFSAAKFASFITQYSTGQVSVEIEWELQKENSKRWNPEVQYTSNYNKSVNVDFTVDTNGVYSEPRPIGTRYLTRNL

SEQ ID NO: 571 - DNA, 2208 bp, Artificial Sequence
  source: /note="Description of Artificial Sequence: Synthetic polynucleotide"
atggctgccgatggttatcttccagattggctcgaggacactctctctgaaggaataagacagtggtggaagctcaaacctggcccaccaccaccaaagcccgcagagcggcataaggacgacagcaggggtcttgtgcttcctgggtacaagtacctcggacccttcaacggactcgacaagggagagccggtcaacgaggcagacgccgcggccctcgagcacgacaaagcctatgaccggcagctcgacagcggagacaacccgtacctcaagtacaaccacgccgacgcggagtttcaggagcgccttaaagaagatacgtcttttgggggcaacctcggacgagcagtcttccaggcgaaaaagagggttcttgaacctctgggcctggttgaggaacctgttaagacggctccgggaaaaaagaggccggtagagcactctcctgtggagccagactcctcctcgggaaccggaaaggcgggccagcagcctgcaagaaaaagattgaattttggtcagactggagacgcaaactcagtacctgacccccagcctctcggacagccaccagcagccccctctggtctgggaactaatacgatggctacaggcagtggcgcaccaatggcagacaataacgagggcgccgacggagtgggtaattcctcgggaaattggcattgcgattccacatggatgggcgacagagtcatcaccaccagcacccgaacctgggccctgcccacctacaacaaccacctctacaaacaaatttccagccaatcaggagcctcgaacgacaatcactactttggctacagcaccccttgggggtattttgacttcaacagattccactgccacttttcaccacgtgactggcaaagactcatcaacaacaactggggattccgacccaagagactcaagttcaagctctttaacattcaagtcaaagaggtcacgcagaatgacggtacgacgacgattgccaataaccttaccagcacggttcaggtgtttactgactcggagtaccagctcccgtacgtcctcggctcggcgcatcaaggatgcctcccgccgttcccagcagacgtcttcatggtgccacagtatggatacctcaccctgaacaacgggagtcgggcagtaggacgctcttcattttactgcctggagtactttccttctcagatgctgcgtaccggtaacaactttaccttcagctacacttttgaggacgttcctttccacagcagctacgctcacagccagagtctggaccgtctcatgaatcctctcatcgaccagtacctgtattacttgagcagaacagacactccaagtggaaccaccacgcagtcaaggcttcagttttctcaggccggagcgagtgacattcgggaccagtctaggaactggcttcctggaccctgttaccgccagcagcgagtatcaaagacatctgcggataacaacaacagtgaatactcgtggactggagctaccaagtaccacctcaatggcagagactctctggtgaatccgggcccggccatggcaagccacaaggacgatgaagaaaagttttttcctcagagcggggttctcatctttgggaagcaaggctcagagaaaacaagtgtggacattgaaaaggtcatgattacagacgaagaggaaatcaggacgaccaatcccgtggctacggagcagtatggttctgtatctaccaacctccagagaggcaacagacaagcagctaccgcagatgtcaacacacaaggcgttcttccaggcatggtctggcaggacagagatgtgtaccttcaggggcccatctgggcaaagattccacacacggacggacattttcacccctctcccctcatgggtggattcggacttaaacaccctcctccacagattctcatcaagaacaccccggtacctgcgaatccttcgaccaccttcagtgcggcaaagtttgcttccttcatcacacagtactccacgggacaggtcagcgtggagatcgagtgggagctgcagaaggaaaacagcaaacgctggaatcccgaagttcagtacacttccaactacaacaagtctgttaatgtggactttactgtggacactaatggcgtgtatacagagcctcgccccattggcaccagatacctgactcgtaatctgtaa

SEQ ID NO: 572 - protein, 735 aa, Artificial Sequence
  source: /note="Description of Artificial Sequence: Synthetic polypeptide"
MAADGYLPDWLEDTLSEGIRQWWKLKPGPPPPKPAERHKDDSRGLVLPGYKYLGPFNGLDKGEPVNEADAAALEHDKAYDRQLDSGDNPYLKYNHADAEFQERLKEDTSFGGNLGRAVFQAKKRVLEPLGLVEEPVKTAPGKKRPVEHSPVEPDSSSGTGKAGQQPARKRLNFGQTGDANSVPDPQPLGQPPAAPSGLGTNTMATGSGAPMADNNEGADGVGNSSGNWHCDSTWMGDRVITTSTRTWALPTYNNHLYKQISSQSGASNDNHYFGYSTPWGYFDFNRFHCHFSPRDWQRLINNNWGFRPKRLKFKLFNIQVKEVTQNDGTTTIANNLTSTVQVFTDSEYQLPYVLGSAHQGCLPPFPADVFMVPQYGYLTLNNGSRAVGRSSFYCLEYFPSQMLRTGNNFTFSYTFEDVPFHSSYAHSQSLDRLMNPLIDQYLYYLSRTDTPSGTTTQSRLQFSQAGASDIRDQSRNWLPGPCYRQQRVSKTSADNNNSEYSWTGATKYHLNGRDSLVNPGPAMASHKDDEEKFFPQSGVLIFGKQGSEKTSVDIEKVMITDEEEIRTTNPVATEQYGSVSTNLQRGNRQAATADVNTQGVLPGMVWQDRDVYLQGPIWAKIPHTDGHFHPSPLMGGFGLKHPPPQILIKNTPVPANPSTTFSAAKFASFITQYSTGQVSVEIEWELQKENSKRWNPEVQYTSNYNKSVNVDFTVDTNGVYTEPRPIGTRYLTRNL

SEQ ID NO: 573 - DNA, 2211 bp, Artificial Sequence
  source: /note="Description of Artificial Sequence: Synthetic polynucleotide"
atggctgccgatggttatcttccagattggctcgaggacactctctctgaaggaataagacagtggtggaagctcaaacctggcccaccaccaccaaagcccgcagagcggcataaggacgacagcaggggtcttgtgcttcctgggtacaagtacctcggacccttcaacggactcgacaagggagagccggtcaacgaggcagacgccgcggccctcgagcacgacaaggcctacgaccagcagctcaaagcgggtgacaatccgtacctgcggtataaccacgccgacgccgagtttcaggagcgtctgcaagaagatacgtcttttgggggcaacctcgggcgagcagtcttccaggccaagaagcgggttctcgaacctctcggtctggttgaggaaggcgctaagacggctcctggaaagaaacgtccggtagagcagtcgccacaagagccagactcctcctcgggcatcggcaagacaggccagcagcccgctaaaaagagactcaattttggtcagactggcgactcagagtcagtccccgacccacaacctctcggagaacctccagcaacccccgctgctgtgggacctactacaatggcttcaggcggtggcgcaccaatggcagacaataacgaaggcgccgacggagtgggtaatgcctcaggaaattggcattgcgattccacatggctgggcgacagagtcatcaccaccagcacccgaacatgggccttgcccacctataacaaccacctctacaagcaaatctccagtgcttcgacgggggccagcaacgacaaccactacttcggctacagcaccccctgggggtattttgactttaacagattccactgccacttttcaccacgtgactggcagcgactcatcaacaataactggggattccggcccaagagactcagcttcaagctcttcaacatccaggtcaaggaggtcacgacgaatgatggcgtcacaaccatcgctaataaccttaccagcacggttcaagtcttctcggactcggagtaccagcttccgtacgtcctcggctctgcgcaccagggctgcctccctccgttcccggcggacgtgttcatgattccgcaatacggctacctgacgctcaacaatggcagccaagccgtgggacgttcatccttttactgcctggaatatttcccttctcagatgctgagaacgggcaacaactttaccttcagctacacctttgaggaagtgcctttccacagcagctacgcgcacagccagagcctggaccggctgatgaatcctctcatcgatcaatacctgtattacctgaacagaactcaaaatcagtccggaagtgcccaaaacaaggacttgctgtttagccgtgggtctccagctggcatgtctgttcagcccaaaaactggctacctggaccctgttatcggcagcagcgcgtttctaaaacaaaaacagacaacaacaacagcaattttacctggactggtgcttcaaaatataacctcaatgggcgtgaatccatcatcaaccctggcactgctatggcctcacacaaagacgacgaagacaagttctttcccatgagcggtgtcatgatttttggaaaagagagcgccggagcttcaaacactgcattggacaatgtcatgattacggacgaagaggaaattaaagccactaaccctgtggccaccgaaagatttgggaccgtggcagtcaatttccagagcagcagcacagaccctgcgaccggagatgtgcatgctatgggagcattacctggcatggtgtggcaagatagagacgtgtacctgcagggtcccatttgggccaaaattcctcacacagatggacactttcacccgtctcctcttatgggcggctttggactcaagaacccgcctcctcagatcctcatcaaaaacacgcctgttcctgcgaatcctccggcggagttttcagctacaaagtttgcttcattcatcactcaatactccacaggacaagtgagcgtggaaattgaatgggagctgcagaaagaaaacagcaaacgctggaatcccgaagtgcagtatacatctaactatgcaaaatctgccaacgttgatttcactgtggacaacaatggactttatactgagcctcgccccattggcacccgttacctcacccgtcccctgtaa

SEQ ID NO: 574 - protein, 736 aa, Artificial Sequence
  source: /note="Description of Artificial Sequence: Synthetic polypeptide"
MAADGYLPDWLEDTLSEGIRQWWKLKPGPPPPKPAERHKDDSRGLVLPGYKYLGPFNGLDKGEPVNEADAAALEHDKAYDQQLKAGDNPYLRYNHADAEFQERLQEDTSFGGNLGRAVFQAKKRVLEPLGLVEEGAKTAPGKKRPVEQSPQEPDSSSGIGKTGQQPAKKRLNFGQTGDSESVPDPQPLGEPPATPAAVGPTTMASGGGAPMADNNEGADGVGNASGNWHCDSTWLGDRVITTSTRTWALPTYNNHLYKQISSASTGASNDNHYFGYSTPWGYFDFNRFHCHFSPRDWQRLINNNWGFRPKRLSFKLFNIQVKEVTTNDGVTTIANNLTSTVQVFSDSEYQLPYVLGSAHQGCLPPFPADVFMIPQYGYLTLNNGSQAVGRSSFYCLEYFPSQMLRTGNNFTFSYTFEEVPFHSSYAHSQSLDRLMNPLIDQYLYYLNRTQNQSGSAQNKDLLFSRGSPAGMSVQPKNWLPGPCYRQQRVSKTKTDNNNSNFTWTGASKYNLNGRESIINPGTAMASHKDDEDKFFPMSGVMIFGKESAGASNTALDNVMITDEEEIKATNPVATERFGTVAVNFQSSSTDPATGDVHAMGALPGMVWQDRDVYLQGPIWAKIPHTDGHFHPSPLMGGFGLKNPPPQILIKNTPVPANPPAEFSATKFASFITQYSTGQVSVEIEWELQKENSKRWNPEVQYTSNYAKSANVDFTVDNNGLYTEPRPIGTRYLTRPL

SEQ ID NO: 575 - protein, 735 aa, Artificial Sequence
  source: /note="Description of Artificial Sequence: Synthetic polypeptide"
MAADGYLPDWLEDTLSEGIRQWWKLKPGPPPPKPAERHKDDSRGLVLPGYKYLGPFNGLDKGEPVNEADAAALEHDKAYDRQLDSGDNPYLKYNHADAEFQERLKEDTSFGGNLGRAVFQAKKRVLEPLGLVEEPVKTAPGKKRPVEHSPVEPDSSSGTGKAGQQPARKRLNFGQTGDADSVPDPQPLGQPPAAPSGLGTNTMATGSGAPMADNNEGADGVGNSSGNWHCDSTWMGDRVITTSTRTWALPTYNNHLYKQISSQSGASNDNHYFGYSTPWGYFDFNRFHCHFSPRDWQRLINNNWGFRPKRLKFKLFNIQVKEVTQNDGTTTIANNLTSTVQVFTDSEYQLPYVLGSAHQGCLPPFPADVFMVPQYGYLTLNNGSQAVGRSSFYCLEYFPSQMLRTGNNFTFSYTFEDVPFHSSYAHSQSLDRLMNPLIDQYLYYLSRTDTPSGTTTQSRLQFSQAGASDIRNQSRNWLPGPCYRQQRVSKTSADNNNSEYSWTGATKYHLNGRDSLVNPGPAMASHKDDEEKFFPQSGVLIFGKQGSEKTSVDIEKVMITDEEEIRTTNPVATEQYGSVSTNLQRGNRQAATADVNTQGVLPGMVWQDRDVYLQGPIWAKIPHTDGHFHPSPLMGGFGLKHPPPQILIKNTPVPANPSTTFSAAKFASFITQYSTGQVSVEIEWELQKENSKRWNPEVQYTSNYNKSVNVDFTVDTNGVYSEPRPIGTRYLTRNQ

SEQ ID NO: 576 - DNA, 2208 bp, Artificial Sequence
  source: /note="Description of Artificial Sequence: Synthetic polynucleotide"
atggctgccgatggttatcttccagattggctcgaggacactctctctgaaggaataagacagtggtggaagctcaaacctggcccaccaccaccaaagcccgcagagcggcataaggacgacagcaggggtcttgtgcttcctgggtacaagtacctcggacccttcaacggactcgacaagggagagccggtcaacgaggcagacgccgcggccctcgagcacgacaaagcctatgaccggcagctcgacagcggagacaacccgtacctcaagtacaaccacgccgacgcggagtttcaggaacgccttaaagaagatacgtcttttgggggcaacctcggacgagcagtcttccaggcgaaaaagagggttcttgaacctctgggcctggttgaggaacctgttaagacggctccgggaaaaaagaggccggtagagcactctcctgtggagccagactcctcctcgggaaccggaaaggcgggccagcagcctgcaagaaaaagattgaattttggtcagactggagacgcagactcagtacctgacccccagcctctcggacagccaccagcagccccctctggtctgggaactaatacgatggctacaggcagtggcgcaccaatggcagacaataacgagggcgccgacggagtgggtaattcctcgggaaattggcattgcgattccacatggatgggcgacagagtcatcaccaccagcacccgaacctgggccctgcccacctacaacaaccacctctacaaacaaatttccagccaatcaggagcctcgaacgacaatcactactttggctacagcaccccttgggggtattttgacttcaacagattccactgccacttttcaccacgtgactggcaaagactcatcaacaacaactggggattccgacccaagagactcaagttcaagctctttaacattcaagtcaaagaggtcacgcagaatgacggtacgacgacgattgccaataaccttaccagcacggttcaggtgtttactgactcggagtaccagctcccgtacgtcctcggctcggcgcatcaaggatgcctcccgccgttcccagcagacgtcttcatggtgccacagtatggatacctcaccctgaacaacgggagtcaggcagtaggacgctcttcattttactgcctggagtactttccttctcagatgctgcgtaccggtaacaactttaccttcagctacacttttgaggacgttcctttccacagcagctacgctcacagccagagtctggaccgtctcatgaatcctctcatcgaccagtacctgtattacttgagcagaacagacactccaagtggaaccaccacgcagtcaaggcttcagttttctcaggccggagcgagtgacattcggaaccagtctaggaactggcttcctggaccctgttaccgccagcagcgagtatcaaagacatctgcggataacaacaacagtgaatactcgtggactggagctaccaagtaccacctcaatggcagagactctctggtgaatccgggcccggccatggcaagccacaaggacgatgaagaaaagttttttcctcagagcggggttctcatctttgggaagcaaggctcagagaaaacaagtgtggacattgaaaaggtcatgattacagacgaagaggaaatcaggacaaccaatcccgtggctacggagcagtatggttctgtatctaccaacctccagagaggcaacagacaagcagctaccgcagatgtcaacacacaaggcgttcttccaggcatggtctggcaggacagagatgtgtaccttcaggggcccatctgggcaaagattccacacacggacggacattttcacccctctcccctcatgggtggattcggacttaaacaccctcctccacagattctcatcaagaacaccccggtacctgcgaatccttcgaccaccttcagtgcggcaaagtttgcttccttcatcacacagtactccacgggacaggtcagcgtggagatcgagtgggagctgcagaaggaaaacagcaaacgctggaatcccgaagttcagtacacttccaactacaacaagtctgttaatgtggactttactgtggacactaatggcgtgtattcagagcctcgccccattggcaccagatacctgactcgtaatcagtaa

SEQ ID NO: 577 - DNA, 2208 bp, Artificial Sequence
  source: /note="Description of Artificial Sequence: Synthetic polynucleotide"
atggctgccgatggttatcttccagattggctcgaggacactctctctgaaggaataagacagtggtggaagctcaaacctggcccaccaccaccaaagcccgcagagcggcataaggacgacagcaggggtcttgtgcttcctgggtacaagtacctcggacccttcaacggactcgacaagggagagccggtcaacgaggcagacgccgcggccctcgagcacgacaaagcctatgaccggcagctcgacagcggagacaacccgtacctcaagtacaaccacgccgacgcggagtttcaggagcgccttaaagaagatacgtcttttgggggcaacctcggacgagcagtcttccaggcgaaaaagagggttcttgaacctctgggcctggttgaggaacctgttaagacggctccgggaaaaaagaggccggtagagcactctcctgtggagccagactcctcctcgggaaccggaaaggcgggccagcagcctgcaagaaaaagattgaattttggtcagactggagacgcagactcagtacctgatccccagcctctcggacagccaccagcagccccctctggtctgggaactaatacgatggctacaggcagtggcgcaccaatggcagacaataacgagggcgccgacggagtgggtaattcctcgggaaattggcattgcgattccacatggatgggcgacagagtcatcaccaccagcacccgaacctgggccctgcccacctacaacaaccacctctacaaacaaatttccagccaatcaggagcctcgaacgacaatcactactttggctacagcaccccttgggggtattttgacttcaacagattccactgccacttttcaccacgtgactggcaaagactcatcaacaacaactggggattccgacccaagagactcaagttcaagctctttaacattcaagtcaaagaggtcacgcagaatgacggtacgacgacgattgccaataaccttaccagcacggttcaggtgtttactgactcggagtaccagctcccgtatgtcctcggctcggcgcatcaaggatgcctcccgccgttcccagcagacgtcttcatggtgccacagtatggatacctcaccctgaacaacgggagtcaggcagtaggacgctcttcattttactgcctggagtactttccttctcagatgctgcgtaccggtaacaactttaccttcagctacacttttgaggacgttcctttccacagcagctacgctcacagccagagtctggaccgtctcatgaatcctctcatcgaccagtacctgtattacttgagcagaacagacactccaagtggaaccaccacgcagtcaaggcttcagttttctcaggccggagcgagtgacattcgggaccagtctaggaactggcttcctggaccctgttaccgccagcagcgagtatcaaagacatctgcggataacaacaacagtgaatactcgtggactggagctaccaagtaccacctcaatggcagagactctctggtgaatccgggcccggccatggcaagccacaaggacgatgaagaaaagttttttcctcagagcggggttctcatctttgggaagcaaggctcagagaaaacaagtgtggacattgaaaaggtcatgattacagacgaagaggaaatcaggacaaccaatcccgtggctacggagcagtatggttctgtatctaccaacctccagagaggcaacagacaagcagctaccgcagatgtcaacacacaaggcgttcttccaggcatggtctggcaggacagagatgtgtaccttcaggggcccatctgggcaaagattccacacacggacggacattttcacccctctcccctcatgggtggattcggacttaaacaccctcctccacagattctcatcaagaacaccccggtacctgcgaatccttcgaccaccttcagtgcggcaaagtttgcttccttcatcacacagtactccacgggacaggtcagcgtggagatcgagtgggagctgcagaaggaaaacagcaaacgctggaatcccgaagttcagtacacttccaactacaacaagtctgttaatgtggactttactgtggacactaatggcgtgtattcagagcctcgccccattggcaccagatacctgactcgtaatctgtaa

SEQ ID NO: 578 - protein, 735 aa, Artificial Sequence
  source: /note="Description of Artificial Sequence: Synthetic polypeptide"
MAADGYLPDWLEDTLSEGIRQWWKLKPGPPPPKPAERHKDDSRGLVLPGYKYLGPFNGLDKGEPVNEADAAALEHDKAYDRQLDSGDNPYLKYNHADAEFQERLKEDTSFGGNLGRAVFQAKKRVLEPLGLVEEPVKTAPGKKRPVEHSPVEPDSSSGTGKAGQQPARKRLNFGQTGDADSVPDPQPLGQPPAAPSGLGTNTMATGSGAPMADNNEGADGVGNSSGNWHCDSTWMGDRVITTSTRTWALPTYNNHLYKQISSQSGASNDNHYFGYSTPWGYFDFNRFHCHFSPRDWQRLINNNWGFRPKRLKFKLFNIQVKEVTQNDGTTTIANNLTSTVQVFTDSEYQLPYVLGSAHQGCLPPFPADVFMVPQYGYLTLNNGSQAVGRSSFYCLEYFPSQMLRTGNNFTFSYTFEDVPFHSSYAHSQSLDRLMNPLIDQYLYYLSRTDTPSGTTTQSRLQFSQAGASDIRDQSRNWLPGPCYRQQRVSKTSADNNNSEYSWTGATKYHLNGRDSLVNPGPAMASHKDDEEKFFPQSGVLIFGKQGSEKTSVDIEKVMITDEEEIRTTNPVATEQYGSVSTNLQRGNRQAATADVNTQGVLPGMVWQDRDVYLQGPIWAKIPHTDGHFHPSPLMGGFGLKHPPPQILIKNTPVPANPSTTFSAAKFASFITQYSTGQVSVEIEWELQKENSKRWNPEVQYTSNYNKSVNVDFTVDTNGVYSEPRPIGTRYLTRNL

SEQ ID NO: 579 - DNA, 2601 bp, Artificial Sequence
  source: /note="Description of Artificial Sequence: Synthetic polynucleotide"
ccatcgacgtcagacgcggaagcttcgatcaactacgcggacaggtaccaaaacaaatgttctcgtcacgtgggcatgaatctgatgctgtttccctgcagacaatgcgagagactgaatcagaattcaaatatctgcttcactcacggtgtcaaagactgtttagagtgctttcccgtgtcagaatctcaacccgtttctgtcgtcaaaaaggcgtatcagaaactgtgctacattcatcacatcatgggaaaggtgccagacgcttgcactgcttgcgacctggtcaatgtggacttggatgactgtgtttctgaacaataaatgacttaaaccaggtatgactgccgatggttatcttccagattggctcgaggacaaccttagtgaaggaattcgcgagtggtgggctttgaaacctggagcccctcaacccaaggcaaatcaacaacatcaagacaacgctcgaggtcttgtgcttccgggttacaaataccttggacccggcaacggactcgacaagggggagccggtcaacgcagcagacgcggcggccctcgagcacgacaaggcctacgaccagcagctcaaggccggagacaacccgtacctcaagtacaaccacgccgacgccgagttccaggagcggctcaaagaagatacgtcttttgggggcaacctcgggcgagcagtcttccaggccaaaaagaggcttcttgaacctcttggtctggttgaggaagcggctaagacggctcctggaaagaagaggcctgtagagcagtctcctcaggaaccggactcctccgcgggtattggcaaatcgggtgcacagcccgctaaaaagagactcaatttcggtcagactggcgacacagagtcagtcccagaccctcaaccaatcggagaacctcccgcagccccctcaggtgtgggatctcttacaatggcttcaggtggtggcgcaccagtggcagacaataacgaaggtgccgatggagtgggtagttcctcgggaaattggcattgcgattcccaatggctgggggacagagtcatcaccaccagcacccgaacctgggccctgcccacctacaacaatcacctctacaagcaaatctccaacagcacatctggaggatcttcaaatgacaacgcctacttcggctacagcaccccctgggggtattttgacttcaacagattccactgccacttctcaccacgtgactggcagcgactcatcaacaacaactggggattccggcctaagcaactcaacttcaagctcttcaacattcaggtcaaagaggttacggacaacaatggagtcaagaccatcgccaataaccttaccagcacggtccaggtcttcacggactcagactatcagctcccgtacgtgctcgggtcggctcacgagggctgcctcccgccgttcccagcggacgttttcatgattcctcagtacgggtatctgacgcttaatgatggaagccaggccgtgggtcgttcgtccttttactgcctggaatatttcccgtcgcaaatgctaagaacgggtaacaacttccagttcagctacgagtttgagaacgtacctttccatagcagctacgctcacagccaaagcctggaccgactaatgaatccactcatcgaccaatacttgtactatctctcaaagactattaacggttctggacagaatcaacaaacgctaaaattcagtgtggccggacccagcaacatggctgtccagggaagaaactacatacctggacccagctaccgacaacaacgtgtctcaaccactgtgactcaaaacaacaacagcgaatttgcttggcctggagcttcttcttgggctctcaatggacgtaatagcttgatgaatcctggacctgctatggccagccacaaagaaggagaggaccgtttctttcctttgtctggatctttaatttttggcaaacaaggaactggaagagacaacgtggatgcggacaaagtcatgataaccaacgaagaagaaattaaaactactaacccggtagcaacggagtcctatggacaagtggccacaaaccaccagagtgcccaagcacaggcgcagaccggctgggttcaaaaccaaggaatacttccgggtatggtttggcaggacagagatgtgtacctgcaaggacccatttgggccaaaattcctcacacggacggcaactttcacccttctccgctgatgggagggtttggaatgaagcacccgcctcctcagatcctcatcaaaaacacacctgtacctgcggatcctccaacggccttcaacaaggacaagctgaactctttcatcacccagtattctactggccaagtcagcgtggagatcgagtgggagctgcagaaggaaaacagcaagcgctggaacccggagatccagtacacttccaactattacaagtctaataatgttgaatttgctgttaatactgaaggtgtatatagtgaaccccgccccattggcaccagatacctgactcgtaatctgtaattgcttgttaatcaataaaccgtttaattcgtttcagttgaactgcggcc

SEQ ID NO: 580 - DNA, 2601 bp, Artificial Sequence
  source: /note="Description of Artificial Sequence: Synthetic polynucleotide"
ccatcgacgtcagacgcggaagcttcgatcaactacgcggacaggtaccaaaacaaatgttctcgtcacgtgggcatgaatctgatgctgtttccctgcagacaatgcgagagactgaatcagaattcaaatatctgcttcactcacggtgtcaaagactgtttagagtgctttcccgtgtcagaatctcaacccgtttctgtcgtcaaaaaggcgtatcagaaactgtgctacattcatcacatcatgggaaaggtgccagacgcttgcactgcttgcgacctggtcaatgtggacttggatgactgtgtttctgaacaataaatgacttaaaccaggtatggctgccgatggttatcttccagattggctcgaggacaaccttagtgaaggaattcgcgagtggtgggctttgaaacctggagcccctcaacccaaggcaaatcaacaacatcaagacaacgctcgaggtcttgtgcttccgggttacaaataccttggacccggcaacggactcgacaagggggagccggtcaacgcagcagacgcggcggccctcgagcacgacaaggcctacgaccagcagctcaaggccggagacaacccgtacctcaagtacaaccacgccgacgccgagttccaggagcggctcaaagaagatacgtcttttgggggcaacctcgggcgagcagtcttccaggccaaaaagaggcttcttgaacctcttggtctggttgaggaagcggctaagacggctcctggaaagaagaggcctgtagagcagtctcctcaggaaccggactcctccgcgggtattggcaaatcgggtgcacagcccgctaaaaagagactcaatttcggtcagactggcgacacagagtcagtcccagaccctcaaccaatcggagaacctcccgcagccccctcaggtgtgggatctcttacaatggcttcaggtggtggcgcaccagtggcagacaataacgaaggtgccgatggagtgggtagttcctcgggaaattggcattgcgattcccaatggctgggggacagagtcatcaccaccagcacccgaacctgggccctgcccacctacaacaatcacctctacaagcaaatctccaacagcacatctggaggatcttcaaatgacaacgcctacttcggctacagcaccccctgggggtattttgacttcaacagattccactgccacttctcaccacgtgactggcagcgactcatcaacaacaactggggattccggcctaagcgactcaacttcaagctcttcaacattcaggtcaaagaggttacggacaacaatggagtcaagaccatcgccaataaccttaccagcacggtccaggtcttcacggactcagactatcagctcccgtacgtgctcgggtcggctcacgagggctgcctcccgccgttcccagcggacgttttcatgattcctcagtacgggtatctgacgcttaatgatggaagccaggccgtgggtcgttcgtccttttactgcctggaatatttcccgtcgcaaatgctaagaacgggtaacaacttccagttcagctacgagtttgagaacgtacctttccatagcagctacgctcacagccaaagcctggaccgactaatgaatccactcatcgaccaatacttgtactatctctcaaagactattaacggttctggacagaatcaacaaacgctaaaattcagtgtggccggacccagcaacatggctgtccagggaagaaactacatacctggacccagctaccgacaacaacgtgtctcaaccactgtgactcaaaacaacaacagcgaatttgcttggcctggggcttcttcttgggctctcaatggacgtaatagcttgatgaatcctggacctgctatggccagccacaaagaaggagaggaccgtttctttcctttgtctggatctttaatttttggcaaacaaggaactggaagagacaacgtggatgcggacaaagtcatgataaccaacgaagaagaaattaaaactactaacccggtagcaacggagtcctatggacaagtggccacaaaccaccagagtgcccaagcacaggcgcagaccggctgggttcaaaaccaaggaatacttccgggtatggtttggcaggacagagatgtgtacctgcaaggacccatttgggccaaaattcctcacacgggcggcaactttcacccttctccgctgatgggagggtttggaatgaagcacccgcctcctcagatcctcatcaaaaacacacctgtacctgcggatcctccaacggccttcaacaaggacaagctgaactctttcatcacccagtattctactggccaagtcagcgtggagatcgagtgggagctgcagaaggaaaacagcaagcgctggaacccggagatccagtacacttccaactattacaagtctaataatgttgaatttgctgttaatactggaggtgtatatagtgaaccccgccccattggcaccagatacctgactcgtaatctgtaattgcttgttaatcaataaaccgtttaattcgtttcagttgaactgcggcc

SEQ ID NO: 581 - DNA, 2601 bp, Artificial Sequence
  source: /note="Description of Artificial Sequence: Synthetic polynucleotide"
ccatcgacgtcagacgcggaagcttcgatcaactacgcggacaggtaccaaaacaaatgttctcgtcacgtgggcatgaatctgatgctgtttccctgcagacaatgcgagagactgaatcagaattcaaatatctgcttcactcacggtgtcaaagactgtttagagtgctttcccgtgtcagaatctcaacccgtttctgtcgtcaaaaaggcgtatcagaaactgtgctacattcatcacatcatgggaaaggtgccagacgcttgcactgcttgcgacctggtcaatgtggactcggatgactgtgtttctgaacaataaatgacttaaaccaggtatggctgccgatggttatcttccagattggctcgaggacaaccttagtgaaggaattcgcgagtggtgggctttgaaacctggagcccctcaacccaaggcaaatcaacaacatcaagacaacgctcgaggtcttgtgcttccgggttacaaataccttggacccggcaacggactcgacaagggggagccggtcaacgcagcagacgcggcggccctcgagcacgacaaggcctacgaccagcagctcaaggccggagacaacccgtacctcaagtacaaccacgccgacgccgagttccaggagcggctcaaagaagatacgtcttttgggggcaacctcgggcgagcagtcttccaggccaaaaagaggcttcttgaacctcttggtctggttgaggaagcggctaagacggctcctggaaagaagaggcctgtagagcagtctcctcaggaaccggactcctccgcgggtattgacaaatcgggtgcacagcccgctaaaaagagactcaatttcggtcagactggcgacacagagtcagtcccagaccctcaaccaatcggagaacctcccgcagccccctcaggtgtgggatctcttacaatggcttcaggtggtggcgcaccagtggcagacaataacgaaggtgccgatggagtgggtagttcctcgggaaattggcattgcgattcccaatggctgggggacagagtcatcaccaccagcacccgaacctgggccctgcccacctacaacaatcacctctacaagcaaatctccaacagcacatctggaggatcttcaaatgacaacgcctacttcggctacagcaccccctgggggtattttgacttcaacagattccactgccacttctcaccacgtgactggcagcgactcatcaacaacaactggggattccggcctaagcgactcaacttcaagctcttcaacattcaggtcaaagaggttacggacaacaatggagtcaagaccatcgccaataaccttaccagcacggtccaggtcttcacggactcggactatcagctcccgtacgtgctcgggtcggctcacgagggctgcctcccgccgttcccagcggacgttttcatgattcctcagtacgggtatctgacgcttaatgatggaagccaggccgtgggtcgttcgtccttttactgcctggaatatttcccgtcgcaaatgctaagaacgggtaacaacttccagttcagctacgagtttgagaacgtacctttccatagcagctacgctcacagccaaagcctggaccgactaatgaatccactcatcgaccaatacttgtactatctctcaaagactattaacggttctggacagaatcaacaaacgctaaaattcagtgtggccggacccagcaacatggctgtccagggaagaaactacatacctggacccagctaccgacaacaacgtgtctcaaccactgtgactcaaaacaacaacagcgaatttgcttggcctggagcttcttcttgggctctcaatggacgtaatagcttgatgaatcctggacctgctatggccagccacaaagaaggagaggaccgtttctttcctttgtctggatctttaatttttggcaaacaaggaactggaagagacaacgtggatgcggacaaagtcatgataaccaacgaagaagaaattaaaactactaacccggtagcaacggagtcctatggacaagtggccacaaaccaccagagtgcccaagcacaggcgcagaccggctgggttcaaaaccaaggaatacttccgggtatggtttggcaggacagagatgtgtacctgcaaggacccatttgggccaaaattcctcacacggacggcaactttcacccttctccgctgatgggagggtttggaatgaagcacccgcctcctcagatcctcatcaaaaacacacctgtacctgcggatcctccaacggccttcaacaaggacaagctgaactctttcatcacccagtattctactggccaagtcagcgtggagatcgagtgggagctgcagaaggaaaacagcaagcgctggaacccggagatccagtacacttccaactattacaagtctaataatgttgaatttgctgttaatactgaaggtgtatatagtgaaccccgccccattggcaccagatacctgactcgtaatctgtaattgcttgttaatcaataaaccgtttaattcgtttcagttgaactgcggcc

SEQ ID NO: 582 - DNA, 2601 bp, Artificial Sequence
  source: /note="Description of Artificial Sequence: Synthetic polynucleotide"
ccatcgacgtcagacgcggaagcttcgatcaactacgcggacaggtaccaaaacaaatgttctcgtcacgtgggcatgaatctgatgctgtttccctgcagacaatgcgagagactgaatcagaattcaaatatctgcttcactcacggtgtcaaagactgtttagagtgctttcccgtgtcagaatctcaacccgtttctgtcgtcaaaaaggcgtatcagaaactgtgctacattcatcacatcatgggaaaggtgccagacgcttgcactgcttgcgacctggtcaatgtggacttggatgactgtgtttctgaacaataaatgacttaaaccaggtatggctgccgatggttatcttccagattggctcgaggacaaccttagtgaaggaattcgcgagtggtgggctttgaaacctggagcccctcaacccaaggcaaatcaacaacatcaagacaacgctcgaggtcttgtgcttccgggttacaaataccttggacccggcaacggactcgacaagggggagccggtcaacgcagcagacgcggcggccctcgagcacgacaaggcctacgaccagcagctcaaggccggagacaacccgtacctcaagtacaaccacgccgacgccgagttccaggagcggctcaaagaagatacgtcttttgggggcaacctcgggcgagcagtcctccaggccaaaaagaggcttcttgaacctcttggtctggttgaggaagcggctaagacggctcctggaaagaagaggcctgtagagcagtctcctcaggaaccggactcctccgcgggtattggcaaatcgggtgcacagcccgctaaaaagagactcaatttcggtcagactggcgacacagagtcagtcccagaccctcaaccaatcggagaacctcccgcagccccctcaggtgtgggatctcttacaatggcttcaggtggtggcgcaccagtggcagacaataacgaaggtgccgatggagtgggtagttcctcgggaaattggcattgcgattcccaatggctgggggacagagtcatcaccaccagcacccgaacctgggccctgcccacctacaacaatcacctctacaagcaaatctccaacagcacatctggaggatcttcaaatgacaacgcctacttcggctacagcaccccctgggggtattttgacttcaacagattccactgccacttctcaccacgtgactggcagcgactcatcaacaacaactggggattccggcctaagcgactcaacttcaagctcttcaacattcaggtcaaagaggttacggacaacaatggagtcaagaccatcgccaataaccttaccagcacggtccaggtcttcacggactcagactatcagctcccgtacgtgctcgggtcggctcacgagggctgcctcccgccgttcccagcggacgttttcatgattcctcagtacgggtatctgacgcttaatgatggaagccaggccgtgggtcgttcgtccttttactgcctggaatatttcccgtcgcaaatgctaagaacgggtaacaacttccagttcagctacgagtttgagaacgtacctttccatagcagctacgctcacagccaaagcctggaccgactaatgaatccactcatcgaccaatacttgtactatctctcaaagactattaacggttctggacagaatcaacaaacgctaaaattcagtgtggccggatccagcaacatggctgtccagggaagaaactacatacctggacccagctaccgacaacaacgtgtctcaaccactgtgactcaaaacaacaacagcgaatttgcttggcctggagcttcttcttgggctctcaatggacgtaatagcttgatgaatcctggacctgctatggccagccacaaagaaggagaggaccgtttctttcctttgtctggatctttaatttttggcaaacaaggaactggaagagacaacgtggatgcggacaaagtcatgataaccaacgaagaagaaattaaaactactaacccggtagcaacggagtcctatggacaagtggccacaaaccaccagagtgcccaagcacaggcgcagaccggctgggttcaaaaccaaggaatacttccaggtatggtttggcaggacagagatgtgtacctgcaaggacccatttgggccaaaattcctcacacggacggcaactttcacccttctccgctgatgggagggtttggaatgaagcacccgcctcctcagatcctcatcaaaaacacacctgtacctgcggatcctccaacggccttcaacaaggacaagctgaactctttcatcacccagtattctactggccaagtcagcgtggagatcgagtgggagctgcagaaggaaaacagcaagcgctggaacccggagatccagtacacttccaactattacaagtctaataatgttgaatttgctgttaatactgaaggtgtatatagtgaaccccgccccattggcaccagatacctgactcgtaatctgtaattgcttgttaatcaataaaccgtttaattcgtttcagttgaactgcggcc

SEQ ID NO: 583 - DNA, 2601 bp, Artificial Sequence
  source: /note="Description of Artificial Sequence: Synthetic polynucleotide"
ccatcgacgtcagacgcggaagcttcgatcaactacgcggacaggtaccaaaacaaatgttctcgtcacgtgggcatgaatctgatgctgtttccctgcagacaatgcgagagactgaatcagaattcaaatatctgcttcactcacggtgtcaaagactgtttagagtgctttcccgtgtcagaatctcaacccgtttctgtcgtcaaaaaggcgtatcagaaactgtgctacattcatcacatcatgggaaaggtgccagacgcttgcactgcttgcgacctggtcaatgtggacttggatgactgtgtttctgaacaataaatgacttaaaccaggtatggctgccgatggttatcttccagattggctcgaggacaaccttagtgaaggaattcgcgagtggtgggctttgaaacctggagcccctcaacccaaggcaaatcaacaacatcaagacaacgctcgaggtcttgtgcttccgggttacaaataccttggacccggcaacggactcgacaagggggagccggtcaacgcagcagacgcggcggccctcgagcacgacagggcctacgaccagcagctcaaggccggagacaacccgtacctcaagtacaaccacgccgacgccgagttccaggagcggctcaaagaagatacgtcttttgggggcaacctcgggcgagcagtcttccaggccaaaaagaggcttcttgaacctcttggtctggttgaggaagcggctaagacggctcctggaaagaagaggcctgtagagcagtctcctcaggaaccggactcctccgcgggtattggcaaatcgggtgcacagcccgctaaaaagagactcaatttcggtcagactggcgacacagagtcagtcccagaccctcaaccaatcggagaacctcccgcagccccctcaggtgtgggatctcttacaatggcttcaggtggtggcgcaccagtggcagacaataacgaaggtgccgatggagtgggtagttcctcgggaaattggcattgcgattcccaatggctgggggacagagtcatcaccaccagcacccgaacctgggccctgcccacctacaacaatcacctctacaagcaaatctccaacagcacatctggaggatcttcaaatgacaacgcctacttcggctacagcaccccctgggggtattttgacttcaacagattccactgccacttctcaccacgtgactggcagcgactcatcaacaacaactggggattccggcctaagcgactcaacttcaagctcttcaacattcaggtcaaagaggttacggacaacaatggagtcaagaccatcgccaataaccttaccagcacggtccaggtcttcacggactcagactatcagctcccgtacgtgctcgggtcggctcacgagggctgcctcccgccgttcccagcggacgttttcatgattcctcagtacgggtatctgacgcttaatgatggaagccaggccgtgggtcgttcgtccttttactgcctggaatatttcccgtcgcaaatgctaagaacgggtaacaacttccagttcagctacgagtttgagaacgtacctttccatagcagctacgctcacagccaaagcctggaccgactaatgaatccactcatcgaccaatacttgtactatctctcaaagactattaacggttctggacagaatcaacaaacgctaaaattcagtgtggccggacctagcaacatggctgtccagggaagaaactacatacctggacccagctaccgacaacaacgtgtctcaaccactgtgactcaaaacaacaacagcgaatttgcttggcctggagcttcttcttgggctctcaatggacgtaatagcttgatgaatcctggacctgctatggccagccacaaagaaggagaggaccgtttctttcctttgtctggatctttaatttttggcaaacaaggaactggaagagacaacgtggatgcggacaaagtcatgataaccaacgaagaagaaattaaaactactaacccggtagcaacggagtcctatggacaagtggccacaaaccaccagagtgcccaagcacaggcgcagaccggctgggttcaaaaccaaggaatacttccgggtatggtttggcaggacagagatgtgtacctgcaaggacccatttgggccaaaattcctcacacggacggcaactttcacccttctccgctgatgggagggtttggaatgaagcacccgcctcctcagatcctcatcaaaaacacacctgtacctgcggatcctccaacggccttcaacaaggacaagctgaactctttcatcacccagtattctactggccaagtcagcgtggagatcgagtgggagctgcagaagaaaaacagcaagcgctggaacccggagatccagtacacttccaactattacaagtctaataatgttgaatttgctgttaacactgaaggtgtatatagtgaaccccgccccattggcaccagatacctgactcgtaatctgtaattgcttgttaatcaataaaccgtttaattcgtttcagttgaactgcggcc

SEQ ID NO: 584 - DNA, 2601 bp, Artificial Sequence
  source: /note="Description of Artificial Sequence: Synthetic polynucleotide"
ccatcgacgtcagacgcggaagcttcgatcaactacgcggacaggtaccaaaacaaatgttctcgtcacgtgggcatgaatctgatgctgtttccctgcagacaatgcgagagactgaatcagaattcaaatatctgcttcactcacggtgtcaaagactgtttagagtgctttcccgtgtcagaatctcaacccgtttctgtcgtcaaaaaggcgtatcagaaactgtgctacattcatcacatcatgggaaaggtgccagacgcttgcactgcttgcgacctggtcaatgtggacttggatgactgtgtttctgaacaataaatgacttaaaccaggtatggctgccgatggttatcttccagattggctcgaggacaaccttagtgaaggaattcgcgagtggtgggctttgaaacctggagcccctcaacccaaggcaaatcaacaacatcaagacaacgctcgaggtcttgtgcttccgggttacaaataccttggacccggcaacggactcgacaagggggagccggtcaacgcagcagacgcggcggccctcgagcacgacaaggcctacgaccagcagctcaaggccggagacaacccgtacctcaagtacaaccacgccgacgccgagttccaggagcggctcaaagaagatacgtcttttgggggcaacctcgggcgagcagtcttccaggccaaaaagaggcttcttgaacctcttggtctggttgaggaagcggctaagacggctcctggaaagaagaggcctgtagagcagtctcctcaggaaccggactcctccgcgggtattggcaaatcgggtgcacagcccgctaaaaagagactcaatttcggtcagactggcgacacagagtcagtcccagaccctcaaccaatcggagaacctcccgcagccccctcaggtgtgggatctcttacaatggcttcaggtggtggcgcaccagtggcagacaataacgaaggtgccgatggagtgggtagttcctcgggaaattggcattgcgattcccaatggctgggggacagagtcatcaccaccagcacccgaacctgggccctgcccacctacaacaatcacctctacaagcaaatctccaacagcacatctggaggatcttcaaatgacaacgcctacttcggctacagcaccccctgggggtattttgacttcaacagattccactgccacttctcaccacgtgactggcagcgactcatcaacaacaactggggattccggcctaagcgactcaacttcaagctcttcaacattcaggtcaaagaggttacggacaacaatggagtcaagaccatcgccaataaccttaccagcacggtccaggtcttcacggactcagactatcagctcccgtacgtgctcgggtcggctcacgagggctgcctcccgccgttcccagcggacgttttcatgattcctcagtacgggtatctgacgcttaatgatggaagccaggccgtgggtcgttcgtccttttactgcctggaatatttcccgtcgcaaatgctaagaacgggtaacaacttccagttcagctacgagtttgagaacgtacctttccatagcagctacgctcacagccaaagcctggaccgactaatgaatccactcatcgaccaatacttgtactatctctcaaagactattaacggttctggacagaatcaacaaacgctaaaattcagtgtggccggacccagcaacatggctgtccagggaagaaactacatacctggacccagctaccgacaacaacgtgtctcaaccactgtgactcaaaacaacaacagcgaatttgcttggcctggagcttcttcttgggctctcaatggacgtaatagcttgatgaatcctggacctgctatggccagccacaaagaaggagaggaccgtttctttcctttgtctggatctttaatttttggcaaacaaggaactggaagagacaacgtggatgcggacaaagtcatgataaccaacgaagaagaaattaaaactactaacccggtagcaacggagtcctatggacaagtggccacaaaccaccagagtgcccaagcacgggcgcagaccggctgggttcaaaaccaaggaatacttccgggtatggtttggcaggacagagatgtgtacctgcaaggacccatttgggccaaaattcctcacacggacggcaactttcacccttctccgctgatgggagggtttggaatgaagcacccgcctcctcagatcctcatcaaaaacacacctgtacctgcggatcctccaacggccttcaacaaggacaagctgaactctttcatcacccagtattctactggccaagtcagcgtggagatcgagtgggagctgcagaaggaaaacagcaagcgctggaacccggagatccagtacacttccaactattacaagtctaataatgttgaatttgctgttaatactgaaggtgtatatagtgaaccccgccccattggcaccagatacctgactcgtaatctgtaattgcttgttaatcaataaaccgtttaattcgtttcagttgaactgcggcc

SEQ ID NO: 585 - DNA, 2601 bp, Artificial Sequence
  source: /note="Description of Artificial Sequence: Synthetic polynucleotide"
ccatcgacgtcagacgcggaagcttcgatcaactacgcggacaggtaccaaaacaaatgttctcgtcacgtgggcatgaatctgatgctgtttccctgcagacaatgcgagagactgaatcagaattcaaatatctgcttcactcacggtgtcaaagactgtttagagtgctttcccgtgtcagaatctcaacccgtttctgtcgtcaaaaaggcgtatcagaaactgtgctacattcatcacatcatgggaaaggtgccagacgcttgcactgcttgcgacctggtcaatgtggacttggatgactgtgtttctgaacaataaatgacttaaaccaggtatggctgccgatggttatcttccagattggctcgaggacaaccttagtgaaggaattcgcgagtggtgggctttgaaacctggagcccctcaacccaaggcaaatcaacaacatcaagacaacgctcgaggtcttgtgcttccgggttacaaataccttggacccggcaacggactcgacaagggggagccggtcaacgcagtagacgcggcggccctcgagcacgacaaggcctacgaccagcagctcaaggccggagacaacccgtacctcaagtacaaccacgccgacgccgagttccaggagcggctcaaagaagatacgtcttttgggggcaacctcgggcgagcagtcttccaggccaaaaagaggcttcttgaacctcttggtctggttgaggaagcggctaagacggctcctggaaagaagaggcctgtagagcagtctcctcaggaaccggactcctccgcgggtattggcaaatcgggtgcacagcccgctaaaaagagactcaatttcggtcagactggcgacacagagtcagtcccagaccctcaaccaatcggagaacctcccgcagccccctcaggtgtgggatctcttacaatggcttcaggtggtggcgcaccagtggcagacaataacgaaggtgccgatggagtgggtagttcctcgggaaattggcattgcgattcccaatggctgggggacagagtcatcaccaccagcacccgaacctgggccctgcccacctacaacaatcacctctacaagcaaatctccaacagcacatctggaggatcttcaaatgacaacgcctacttcggctacagcaccccctgggggtattttgacttcaacagattccactgccacttctcaccacgtgactggcagcgactcatcaacaacaactggggatttcggcctaagcgactcaacttcaagctcttcaacattcaggtcaaagaggttacggacaacaatggagtcaagaccatcgccaataaccttaccagcacggtccaggtcttcacggactcagactatcagctcccgtacgtgctcgggtcggctcacgagggctgcctcccgccgttcccagcggacgttttcatgattcctcagtacgggtatctgacgcttaatgatggaagccaggccgtgggtcgttcgtccttttactgcctggaatatttcccgtcgcaaatgctaagaacgggtaacaacttccagttcagctacgagtttgagaacgtacctttccatagcagctacgctcacagccaaagcctggaccgactaatgaatccactcatcgaccaatacttgtactatctctcaaagactattaacggttctggacagaatcaacaaacgctaaaattcagtgtggccggacccagcaacatggctgtccagggaagaaactacatacctggacccagctaccgacaacaacgtgtctcaaccactgtgactcaaaacaacaacagcgaatttgcttggcctggagcttcttcttgggctctcaatggacgtaatagcttgatgaatcctggacctgctatggccagccacaaagaaggagaggaccgtttctttcctttgtctggatctttaatttttggcaaacaaggaactggaagagacaacgtggatgcggacaaagtcatgataaccaacgaagaagaaattaaaactactaacccggtagcaacggagtcctatggacaagtggccacaaaccaccagagtgcccaagcacaggcgcagaccggctgggttcaaaaccaaggaatacttccgggtatggtttggcaggacagagatgtgtacctgcaaggacccatttgggccaaaattcctcacacggacggcaactttcacccttctccgctgatgggagggtttggaatgaagcacccgcctcctcagatcctcatcaaaaacacacctgtacctgcggatcctccaacggccttcaacaaggacaagctgaactctttcatcacccagtattctactggccaagtcagcgtggagatcgagtgggagctgcagaaggaaaacagcaagcgctggaacccggagatccagtacacttccaactattacaagtctaataatgttgaatttgctgttaatactgaaggtgtatatagtgaaccccgccccattggcaccagatacctgactcgtaatctgtaattgcttgttaatcaataaaccgtttaattcgtttcagttgaactgcggcc

SEQ ID NO: 586 - DNA, 2580 bp, Artificial Sequence
  source: /note="Description of Artificial Sequence: Synthetic polynucleotide"
ccatcgacgtcagacgcggaagcttcgatcaactacgcggacaggtaccaaaacaaatgttctcgtcacgtgggcatgaatctgatgctgtttccctgcagacaatgcgagagactgaatcagaattcaaatatctgcttcactcacggtgtcaaagactgtttagagtgctttcccgtgtcagaatctcaacccgtttctgtcgtcaaaaaggcgtatcagaaactgtgctacattcatcacatcatgggaaaggtgccagacgcttgcactgcttgcgacctggtcaatgtggacttggatgactgtgtttctgaacaataaatgacttaaaccaggtatggctgccgatggttatcttccagattggctcgaggacaaccttagtgaaggaattcgcgagtggtgggctttgaaacctggagcccctcaacccaaggcaaatcaacaacatcaagacaacgctcgaggtcttgtgcttccgggttacaaataccttggacccggcaacggactcgacaagggggagccggtcaacgcagcagacgcggcggccctcgagcacgacaaggcctacgaccagcagctcaaggccggagacaacccgtacctcaagtacaaccacgccgacgccgagttccaggagcggctcaaagaagatacgtcttttgggggcaacctcgggcgagcagtcttccaggccaaaaagaggcttcttgaacctcttggtctggttgaggaagcggctaagacggctcctggaaagaagaggcctgtagagcagtctcctcgggaaccggactcctccgcgggtattggcaaatcgggtgcacagcccgctaaaaagagactcaatttcggtcagactggcgacacagagtcagtcccagaccctcaaccaatcggagaacctcccgcagccccctcaggtgtgggatctcttacaatggcttcaggtggtggcgcaccagtggcagacaataacgaaggtgccgatggagtgggtagttcctcgggaaattggcattgcgattcccaatggctgggggacagagtcatcaccaccagcacccgaacctgggccctgcccacctacaacaatcacctctacaagcaaatctccaacagcacatctggaggatcttcaaatgacaacgcctacttcggctacagcaccccctgggggtattttgacttcaacagattccactgccacttctcaccacgtgactggcagcgactcatcaacaacaactggggattccggcctaagcgactcaacttcaagctcttcaacattcaggtcaaagaggttacggacaacaatggagtcaagaccatcgccaataaccttaccagcacggtccaggtcttcacggactcagactatcagctcccgtacgtgctcgggtcggctcacgagggctgcctcccgccgttcccagcggacgttttcatgattcctcagtacgggtatctgacgcttaatgatggaagccaggccgtgggtcgttcgtccttttactgcctggaatatttcccgtcgcaaatgctaagaacgggtaacaacttccagttcagctacgagtttgagaacgtacctttccatagcagctacgctcacagccaaagcctggaccgactaatgaatccactcatcgaccaatacttgtactatctctcaaagactattaacggttctggacagaatcaacaaacgctaaaattcagtgtggccggacccagcaacatggctgtccagggaagaaactacatacctggacccagctaccgacaacaacgtgtctcaaccactgtgactcaaaacaacaacagcgaatttgcttggcctggagcttcttcttgggctctcaatggacgtaatagcttgatgaatcctggacctgctatggccagccacaaagaaggagaggaccgtttctttcctttgtctggatctttaatttttggcaaacaaggaactggaagagacaacgtggatgcggacaaagtcatgataaccaacgaagaagaaattaaaactactaacccggtagcaacggagtcctatggacaagtggccacaaaccaccagagtgcccaagcacaggcgcagaccggctgggttcaaaaccaaggaatacttccgggtatggtttggcaggacagagatgtgtacctgcaaggacccatttgggccaaaattcctcacacggacggcaactttcacccttctccgctgatgggagggtttggaatgaagcacccgcctcctcagatcctcatcaaaaacacacctgtacctgcggatcctccaacggccttcaacaaggacaagctgaactctttcatcacccagtattctactggccaagtcagcgtggagatcgagtgggaactgcagaaggaaaacagcaagcgctggaacccggagatccagtacacttccaactattacaagtctaataatgttgaatttgctgttaatactgaaggtgtatatagtgaaccccgccccattggcaccagatacctgactcgtaatctgtaattgcttgttaatcaataaaccgtttaatt

SEQ ID NO: 587 - DNA, 2601 bp, Artificial Sequence
  source: /note="Description of Artificial Sequence: Synthetic polynucleotide"
ccatcgacgtcagacgcggaagcttcgatcaactacgcggacaggtaccaaaacaaatgttctcgtcacgtgggcatgaatctgatgctgtttccctgcagacaatgcgagagactgaatcagaattcaaatatctgcttcactcacggtgtcaaagactgtttagagtgctttcccgtgtcagaatctcaacccgtttctgtcgtcaaaaaggcgtatcagaaactgtgctacattcatcacatcatgggaaaggtgccagacgcttgcactgcttgcgacctggtcaatgtggacttggatgactgtgtttctgaacaataaatgacttaaaccaggtatggctgccgatggttatcttccagattggctcgaggacaaccttagtgaaggaattcgcgagtggtgggctttgaaacctggagcccctcaacccaaggcaaatcaacaacatcaagacaacgctcgaggtcttgtgcttccgggttacaaataccttggacccggcaacggactcgacaagggggagccggtcaacgcagcagacgcggcggccctcgagcacgacaaggcctacgaccagcagctcaaggccggagacaacccgtacctcaagtacaaccacgccgacgccgagttccaggagcggctcaaagaagatacgtcttttgggggcaacctcgggcgagcagtctttcaggccaaaaagaggcttcttgaacctcttggtctggttgaggaagcggctaagacggctcctggaaagaagaggcctgtagagcagtctcctcaggaaccggactcctccgcgggtattggcaaatcgggtgcacagcccgctaaaaagagactcaatttcggtcagactggcgacacagagtcagtcccagaccctcaaccaatcggagaacctcccgcagccccctcaggtgtgggatctcttacaatggcttcatgtggtggcgcaccagtggcagacaataacgaaggtgccgatggagtgggtagttcctcgggaaattggcattgcgattcccaatggctgggggacagagtcatcaccaccagcacccgaacctgggccctgcccacctacaacaatcacctctacaagcaaatctccaacagcacatctggaggatcttcaaatgacaacgcctacttcggctacagcaccccctgggggtattttgacttcaacagattccactgccacttctcaccacgtgactggcagcgactcatcaacaacaactggggattccggcctaagcgactcaacttcaagctcttcaacattcaggtcaaagaggttacggacaacaatggagtcaagaccatcgccaataaccttaccagcacggtccaggtcttcacggactcagactatcagctcccgtacgtgctcgggtcggctcacgagggctgcctcccgccgttcccagcggacgttttcatgattcctcagtacgggtatctgacgcttaatgatggaagccaggccgtgggtcgttcgtccttttactgcctggaatatttcccgtcgcaaatgctaagaacgggtaacaacttccagttcagctacgagtttgagaacgtacctttccatagcagctacgctcacagccaaagcctggaccgactaatgaatccactcatcgaccaatacttgtactatctctcaaagactattaacggttctggacagaatcaacaaacgctaaaattcagtgtggccggacccagcaacatggctgtccagggaagaaactacatacctggacccagctaccgacaacaacgtgtctcaaccactgtgactcaaaacaacaacagcgaatttgcttggcctggagcttcttcttgggctctcaatggacgtaatagcttgatgaatcctggacctgctatggccagccacaaagaaggagaggaccgtttctttcctttgtctggatctttaatttttggcaaacaaggaactggaagagacaacgtggatgcggacaaagtcatgataaccaacgaagaagaaattaaaactactaacccggtagcaacggagtcctatggacaagtggccacaaaccaccagagtgcccaagcacaggcgcagaccggctgggttcaaaaccaaggaatacttccgggtatggtttggcaggacagagatgtgtacctgcaaggacccatttgggccaaaattcctcacacggacggcaactttcacccttctccgctgatgggagggtttggaatgaagcacccgcctcctcagatcctcatcaaaaacacacctgtacctgcggatcctccaacggccttcaacaaggacaagctgaactctttcatcacccagtattctactggccaagtcagcgtggagatcgagtgggagctgcagaaggaaaacagcaagcgctggaacccggagatccagtacacttccaactattacaagtctaataatgttgaatttgctgttaatactgaaggtgtatatagtgaaccccgccccattggcaccagatacctgactcgtaatctgtaattgcttgttaatcaataaaccgtttaattcgtttcagttgaactgcggcc

SEQ ID NO: 588 - DNA, 2601 bp, Artificial Sequence
  source: /note="Description of Artificial Sequence: Synthetic polynucleotide"
ccatcgacgtcagacgcggaagcttcgatcaactacgcggacaggtaccaaaacaaatgttctcgtcacgtgggcatgaatctgatgctgtttccctgcagacaatgcgagagactgaatcagaattcaaatatctgcttcactcacggtgtcaaagactgtttagagtgctttcccgtgtcagaatctcaacccgtttctgtcgtcaaaaaggcgtatcagaaactgtgctacattcatcacatcatgggaaaggtgccagacgcttgcactgcttgcgacctggtcaatgtggacttggatgactgtgtttctgaacaataaatgacttaaaccaggtatggctgccgatggttatcttccagattggctcgaggacaaccttagtgaaggaattcgcgagtggtgggctttgaaacctggagcccctcaacccaaggcaaatcaacaacatcaagacaacgctcgaggtcttgtgcttccgggttacaaataccttggacccggcaacggactcgacaagggggagccgatcaacgcagcagacgcggcggccctcgagcacgacaaggcctacgaccagcagctcaaggccggagacaacccgtacctcaagtacaaccacgccgacgccgagttccaggagcggctcaaagaagatacgtcttttgggggcaacctcgggcgagcagtcttccaggccaaaaagaggcttcttgaacctcttggtctggttgaggaagcggctaagacggctcctggaaagaagaggcctgtagagcagtctcctcaggaaccggactcctccgcgggtattggcaaatcgggtgcacagcccgctaaaaagagactcaatttcggtcagactggcgacacagagtcagtcccagaccctcaaccaatcggagaacctcccgcagccccctcaggtgtgggatctcttacaatggcttcaggtggtggcgcaccagtggcagacaataacgaaggtgccgatggagtgggtagttcctcgggaaattggcattgcgattcccaatggctgggggacagagtcatcaccaccagcacccgaacctgggccctgcccacctacaacaatcacctctacaagcaaatctccaacagcacatctggaggatcttcaaatgacaacgcctacttcggctacagcaccccctgggggtattttgacttcaacagattccactgccacttctcaccacgtgactggcagcgactcatcaacaacaactggggattccggcctaagcgactcaacttcaagctcttcaacattcaggtcaaagaggttacggacaacaatggagtcaagaccatcgccaataaccttaccagcacggtccaggtcttcacggactcagactatcagctcccgtacgtgctcgggtcggctcacgagggctgcctcccgccgttcccagcggacgttttcatgattcctcagtacgggtatctgacgcttaatgatggaagccaggccgtgggtcgttcgtccttttactgcctggaatatttcccgtcgcaaatgctaagaacgggtaacaacttccagttcagctacgagtttgagaacgtacctttccatagcagctacgctcacagccaaagcctggaccgactaatgaatccactcatcgaccaatacttgtactatctctcaaagactattaacggttctggacagaatcaacaaacgctaaaattcagtgtggccggacccagcaacatggctgtccagggaagaaactacatacctggacccagctaccgacaacaacgtgtctcaaccactgtgactcaaaacaacaacagcgaatttgcttggcctggagcttcttcttgggctctcaatggacgtaatagcttgatgaatcctggacctgctatggccagccacaaagaaggagaggaccgtttctttcctttgtctggatctttaatttttggcaaacaaggaactggaagagacaacgtggatgcggacaaagtcatgataaccaacgaagaagaaattaaaactactaacccggtagcaacggagtcctatggacaagtggccacaaaccaccagagtgcccaagcacaggcgcagaccggctgggttcaaaaccaaggaatacttccgggtatggtttggcaggacagagatgtgtacctgcaaggacccatttgggccaaaattcctcacacgtacggcaactttcacccttctccgctgatgggagggtttggaatgaagcacccgcctcctcagatcctcatcaaaaacacacctgtacctgcggatcctccaacggccttcaacaaggacaagctgaactctttcatcacccagtattctactggccaagtcagcgtggagatcgagtgggagctgcagaaggaaaacagcaagcgctggaacccggagatccagtacacttccaactattacaagtctaataatgttgaatttgctgttaatactgaaggtgtatatagtgaaccccgccccattggcaccagatacctgactcgtaatctgtaattgcttgttaatcaataaaccgtttaattcgtttcagttgaactgcggcc

SEQ ID NO: 589 - DNA, 2601 bp, Artificial Sequence
  source: /note="Description of Artificial Sequence: Synthetic polynucleotide"
ccatcgacgtcagacgcggaagcttcgatcaactacgcggacaggtaccaaaacaaatgttctcgccacgtgggcatgaatctgatgctgtttccctgcagacaatgcgagagactgaatcagaattcaaatatctgcttcactcacggtgtcaaagactgtttagagtgctttcccgtgtcagaatctcaacccgtttctgtcgtcaaaaaggcgtatcagaaactgtgctacattcatcacatcatgggaaaggtgccagacgcttgcactgcttgcgacctggtcaatgtggacttggatgactgtgtttctgaacaataaatgacttaaaccaggtatggctgccgatggttatcttccagattggctcgaggacaaccttagtgaaggaattcgcgagtggtgggctttgaaacctggagcccctcaacccaaggcaaatcaacaacatcaagacaacgctcgaggtcttgtgcttccgggttacaaataccttggacccggcaacggactcgacaagggggagccggtcaacgcagcagacgcggcggccctcgagcacgacaaggcctacgaccagcagctcaaggccggagacaacccgtacctcaagtacaaccacgccgacgccgagttccaggagcggctcaaagaagatacgtcttttgggggcaacctcgggcgagcagtcttccaggccaaaaagaggcttcttgaacctcttggtctggttgaggaagcggctaagacggctcctggaaagaagaggcctgtagagcagtctcctcaggaaccggactcctccgcgggtattggcaaatcgggtgcacagcccgctaaaaagagactcaatttcggtcagactggcgacacagagtcagtcccagaccctcaaccaatcggagaacctcccgctgccccctcaggtgtgggatctcttacaatggcttcaggtggtggcgcaccagtggcagacaataacgaaggtgccgatggagtgggtagttcctcgggaaattggcattgcgattcccaatggctgggggacagagtcatcaccaccagcacccgaacctgggccctgcccacctacaacaatcacctctacaagcaaatctccaacagcacatctggaggatcttcaaatgacaacgcctacttcggctacagcaccccctgggggtattttgacttcaacagattccactgccacttctcaccacatgactggcagcgactcatcaacaacaactggggattccggcctaagcgactcaacttcaagctcttcaacattcaggtcaaagaggttacggacaacaatggagtcaagaccatcgccaataaccttaccagcacggtccaggtcttcacggactcagactatcagctcccgtacgtgctcgggtcggctcacgagggctgcctcccgccgttcccagcggacgttttcatgattcctcagtacgggtatctgacgcttaatgatggaagccaggccgtgggtcgttcgtccttttactgcctggaatatttcccgtcgcaaatgctaagaacgggtaacaacttccagttcagctacgagtttgagaacgtacctttccatagcagctacgctcacagccaaagcctggaccgactaatgaatccactcatcgaccaatacttgtactatctctcaaagactattaacggttctggacagaatcaacaaacgctaaaattcaatgtggccggacccagcaacatggctgtccagggaagaaactacatacctggacccagctaccgacaacaacgtgtctcaaccactgtgactcaaaacaacaacagcgaatttgcctggcctagagcttcttcttgggctctcaatggacgtaatagcttgatgaatcctggacctgctatggccagccacaaagaaggagaggaccgtttctttcctttgtctggatctttaatttttggcaaacaaggaactggaagagacaacgtggatgcggacaaagtcatgataaccaacgaagaagaaattaaaactactaacccggtagcaacggagtcctatggacaagtggccacaaaccaccagagtgcccaagcacaggcgcagaccggctgggttcaaaaccaaggaatacttccgggtatggtttggcaggacagagatgtgtacctgcaaggacccatttgggccaaaattcctcacacggacggcaactttcacccttctccgctgatgggagggtttggaatgaagcacccgcctcctcagatcctcatcaaaaacacacctgtacctgcggatcctccaacggccttcaacaaggacaagctgaactctttcatcacccagtattctactggccaagtcagcatggagatcgagtgggagctgcagaaggaaaacagcaagcgctggaacccggagatccagtacacttccaactattacaagtctaataatgttgaatttgctgttaatactgaaggtgtatatagtgaaccccgccccattggcaccagatacctgactcgtaatctgtaattgcttgttaatcaataaaccgtttaattcgtttcagttgaactgcggcc

SEQ ID NO: 590 - DNA, 2601 bp, Artificial Sequence
  source: /note="Description of Artificial Sequence: Synthetic polynucleotide"
ccatcgacgtcagacgcggaagcttcgatcaactacgcggacaggtaccaaaacaaatgttctcgtcacgtgggcatgaatctgatgctgtttccctgcagacaatgcgagagactgaatcagaattcaaatatctgcttcactcacggtgtcaaagactgtttagagtgctttcccgtgtcagaatctcaacccgtttctgtcgtcaaaaaggcgtatcagaaactgtgctacattcatcacatcatgggaaaggtgccagacgcttgcactgcttgcgacctggtcaatgtggacttggatgactgtgtttctgaacaataaatgacttaaaccaggtatggctgccgatggttatcttccagattggctcgaggacaaccttagtgaaggaattcgcgagtggtgggctttgaaacctggagcccctcaacccaaggcaaatcaacaacatcaagacaacgctcgaggtcttgtgcttccgggttacaaataccttggacccggcaacggactcgacaagggggagccggtcaacgcagcagacgcggcggccctcgagcacgacaaggcctacgaccagcagctcaaggccggagacaacccgtacctcaagtacaaccacgccgacgccgagttccaggagcggctcaaagaagatacgtcttttgggggcaacctcgggcgagcagtcttccaggccaaaaagaggcttcttgaacctcttggtctggttgaggaagcggctaagacggctcctggaaagaagaggcctgtagagcagtctcctcaggaaccggactcctccgcgggtattggcaaatcgggtgcacagcccgctaaaaagagactcaatttcggtcagactggcgacacagagtcagtcccagaccctcaaccaatcggagaacctcccgcagccccctcaggtgtgggatctcttacaatggcttcaggtggtggcgcaccagtggcagacaataacgaaggtgccgatggagtgggtagttcctcgggaaattggcattgcgattcccaatggctgggggacagagtcatcaccaccagcacccgaacctgggccctgcccacctacaacaatcacctctacaagcaaatctccaacagcacatctggaggatcttcaaatgacaacgcctacttcggctacagcaccccctgggggtattttgacttcaacagattccactgccacttctcaccacgtgactggcagcgactcatcaacaacaactggggattccggcctaagcgactcaacttcaagctcttcaacattcaggtcaaagaggttacggacaacaatggagtcaagaccatcgccaataaccttaccagcacggtccaggtcttcacggactcagactatcagctcccgtacgtgctcgggtcggctcacgagggctgcctcccgccgttcccagcggacgttttcatgattcctcagtacgggtatctgacgcttaatgatggaagccaggccgtgggtcgttcgtccttttactgcctggaatatttcccgtcgcaaatgctaagaacgggtaacaacttccagttcagctacgagtttgagaacgtacctttccatagcagctacgctcacagccaaagcctggaccgactaatgaatccactcatcgaccaatacttgtactatctctcaaagactattaacggttctggacagaatcaacaaacgctaaaattcagtgtggccggacccagcaacatggctgtccagggaagaaactacatacctggacccagctaccgacaacaacgtgtctcaaccactgtgactcaaaacaacaacagcgaatttgcttggcctagagcttcttcttgggctctcaatggacgtaatagcttgatgaatcctggacctgctatggccagccacaaagaaggagaggaccgtttctttcctttgtctggatctttaatttttggcaaacaaggaactggaagagacaacgtggatgcggacaaagtcatgataaccaacgaagaagaaattaaaactactaacccggtagcaacggagtcctatggacaagtggccacaaaccaccagagtgcccaagcacaggcgcagaccggctgggttcaaaaccaaggaatacttccgggtatggtttggcaggacagagatgtgtacctgcaaggacccatttgggccaaaattcctcacacggacggcaactttcacccttctccgctgatgggagggtttggaatgaagcacccgcctcctcagatcctcatcaaaaacacacctgtacctgcggatcctccaacggccttcaacaaggacaagctgaactctttcatcacccagtattctactggccaagtcagcgtggagatcgagtgggagctgcagaaggaaaacagcaagcgctggaacccggagatccagtacacttccaactattacaagtctaataatgttgaatttgctgttaatactgaaggtgtatatagtgaaccccgccccattggcaccagatacctgactcgtaatctgtaattgcttgttaatcaataaaccgtttaattcgtttcagttgaactgcggcc

SEQ ID NO: 591 - DNA, 2601 bp, Artificial Sequence
  source: /note="Description of Artificial Sequence: Synthetic polynucleotide"
ccatcgacgtcagacgcggaagcttcgatcaactacgcggacaggtaccaaaacaaatgttctcgtcacgtgggcatgaatctgatgctgtttccctgcagacaatgcgagagactgaatcagaattcaaatatctgcttcactcacggtgtcaaagactgtttagagtgctttcccgtgtcagaatctcaacccgtttctgtcgtcaaaaaggcgtatcagaaactgtgctacattcatcacatcatgggaaaggtgccagacgcttgcactgcttgcgacctggtcaatgtggacttggatgactgtgtttctgaacaataaatgacttaaaccaggtatggctgccgatggttatcttccagattggctcgaggacaaccttagtgaaggaattcgcgagtggtgggctttgaaacctggagcccctcaacccaaggcaaatcaacaacatcaagacaacgctcgaggtcttgtgcttccgggttacaaataccttggacccggcaacggactcgacaagggggagccggtcaacgcagcagacgcggcggccctcgagcacgacaaggcctacgaccagcagctcaaggccggagacaacccgtacctcaagtacaaccacgccgacgccgagttccaggagcggctcaaagaagatacgtcttttgggggcaacctcgggcgagcagtcttccaggccaaaaagaggcttcttgaacctcttggtctggttgaggaagcggctaagacggctcctggaaagaagaggcctgtagagcagtctcctcaggaaccggactcctccgcgggtattggcaaatcgggtgcacagcccgctaaaaagagactcaatttcggtcagactggcgacacagagtcagtcccagaccctcaaccaatcggagaacctcccgcagccccctcaggtgtgggatctcttacaatggcttcaggtggtggcgcaccagtggcagacaataacgaaggtgccgatggagtgggtagttcctcgggaaattggcattgcgattcccaatggctgggggacagagtcatcaccaccagcacccgaacctgggccctgcccacctacaacaatcacctctacaagcaaatctccaacagcacatctggaggatcttcaaatgacaacgcctacttcggctacagcaccccctgggggtattttgacttcaacagattccactgccacttctcaccacgtgactggcagcgactcatcaacaacaactggggattccggcctaagcgactcaacttcaagctcttcaacattcaggtcaaagaggttacggacaacaatggagtcaagaccatcgccaataaccttaccagcacggtccaggtcttcacggactcagactatcagctcccgtacgtgctcgggtcggctcacgagggctgcctcccgccgttcccagcggacgttttcatgattcctcagtacgggtatctgacgcttaatgatggaagccaggccgtgggtcgttcgtccttttactgcctggaatatttcccgtcgcaaatgctaagaacgggtaacaacttccagttcagctacgagtttgagaacgtacctttccatagcagctacgctcacagccaaagcctggaccgactaatgaatccactcatcgaccaatacttgtactatctctcaaagactattaacggttctggacagaatcaacaaacgctaaaattcagtgtggccggacccagcaacatggctgtccagggaagaaactacatacctggacccagctaccgacaacaacgtgtctcaaccactgtgactcaaaacaacaacagcgaatttgcttggcctagagcttcttcttgggctctcaatggacgtaatagcttgatgaatcctggacctgctatggccagccacaaagaaggagaggaccgtttctttcctttgtctggatctttaatttttggcaaacaaggaactggaagagacaacgtggatgcggacaaagtcatgataaccaacgaagaagaaattaaaactactaacccggtagcaacggagtcctatggacaagtggccacaaaccaccagagtgcccaagcacaggcgcagaccggctgggttcaaaaccaaggaatacttccgggtatggtttggcaggacagagatgtgtacctgcaaggacccatttgggccaaaattcctcacacggacggcaactttcacccttctccgctgatgggagggtttggaatgaagcacccgcctcctcagatcctcatcaaaaacacacctgtacctgcggatcctccaacggccttcaacaaggacaagctgaactctttcatcacccagtattctactggccaagtcagcgtggagatcgagtgggagcggcagaaggaaaacagcaagcgctggaacccggagatccagtacacttccaactattacaagtctaataatgttgaatttgctgttaatactgaaggtgtatatagtgaaccccgccccattggcaccagatacctgactcgtaatctgtaattgcttgttaatcaataaaccgtttaattcgtttcagttgaactgcggcc

SEQ ID NO: 592 - DNA, 2601 bp, Artificial Sequence
  source: /note="Description of Artificial Sequence: Synthetic polynucleotide"
ccatcgacgtcagacgcggaagcttcgatcaactacgcggacaggtaccaaaacaaatgttctcgtcacgtgggcatgaatctgatgctgtttccctgcagacaatgcgagagactgaatcagaattcaaatatctgcttcactcacggtgtcaaagactgtttagagtgctttcccgtgtcagaatctcaacccgtttctgtcgtcaaaaaggcgtatcagaaactgtgctacattcatcacatcatgggaaaggtgccagacgcttgcactgcttgcgacctggtcaatgtggacttggatgactgtgtttctgaacaataaatgacttaaaccaggtatggctgccgatggttatcttccagattggctcgaggacaaccttagtgaaggaattcgcgagtggtgggctttgaaacctggagcccctcaacccaaggcaaatcaacaacatcaagacaacgctcgaggtcttgtgcttccgggttacaaataccttggacccggcaacggactcgacaagggggagccggtcaacgcagcagacgcggcggccctcgagcacgacaaggcctacgaccagcagctcaaggccggagacaacccgtacctcaagtacaaccacgccgacgccgagttccaggagcggctcaaagaagatacgtcttttgggggcaacctcgggcgagcagtcttccaggccaaaaagaggcttcttgaacctcttggtctggttgaggaagcggctaagacggctcctggaaagaagaggcctgtagagcagtctcctcaggaaccggactcctccgcgggtattggcaaatcgggtgcacagcccgctaaaaagagactcaatttcggtcagactggcgacacagagtcagtcccagaccctcaaccaatcggagaacctcccgcagccccctcaggtgtgggatctcttacaatggcttcaggtggtggcgcaccagtggcagacaataacgaaggtgccgatggagtgggtagttcctcgggaaattggcattgcgattcccaatggctgggggacagagtcatcaccaccagcacccgaacctgggccctgcccacctacaacaatcacctctacaagcaaatctccaacagcacatctggaggatcttcaaatgacaacgcctacttcggctacagcaccccctgggggtattttgacttcaacagattccactgccacttctcaccacgtgactggcagcgactcatcaacaacaactggggattccggcctaagcgactcaacttcaagctcttcaacattcaggtcaaagaggttacggacaacaatggagtcaagaccatcgccaataaccttaccagcacggtccaggtcttcgcggactcagactatcagctcccgtacgtgctcgggtcggctcacgagggctgcctcccgccgttcccagcggacgttttcatgattcctcagtacgggtatctgacgcttaatgatggaagccaggccgtgggtcgttcgtccttttactgcctggaatatttcccgtcgcaaatgctaagaacgggtaacaacttccagttcagctacgagtttgagaacgtacctttccatagcagctacgctcacagccaaagcctggaccgactaatgaatccactcatcgaccaatacttgtactatctctcaaagactattaacggttctggacagaatcaacaaacgctaaaattcagtgtggccggacccagcaacatggctgtccagggaagaaactacatacctggacccagctaccgacaacaacgtgtctcaaccactgtgactcaaaacaacaacagcgaatttgcttggcctagagcttcttcttgggctctcaatggacgtaatagcttgatgaatcctggacctgctatggccagccacaaagaaggagaggaccgtttctttcctttgtctggatctttaatttttggcaaacaaggaactggaagagacaacgtggatgcggacaaagtcatgataaccaacgaagaagaaattaaaactactaacccggtagcaacggagtcctatggacaagtggccacaaaccaccagagtgcccaagcacaggcgcagaccggctgggttcaaaaccaaggaatacttccgggtatggtttggcaggacagagatgtgtacctgcaaggacccatttgggccaaaattcctcacacggacggcaactttcacccttctccgctgatgggagggtttggaatgaagcacccgcctcctcagatcctcatcaaaaacacacctgtacctgcggatcctccaacggccttcaacaaggacaagctgaactctttcatcacccagtattctactggccaagtcagcgtggagatcgagtgggagctgcagaaggaaaacagcaagcgctggaacccggagatccagtacacttccaactattacaagtctaataatgttgaatttgctgttaatactgaaggtgtatatagtgaaccccgccccattggcaccagatacctgactcgtaatctgtaattgcttgttaatcaataaaccgtttaattcgtttcagttgaactgcggcc

SEQ ID NO: 593 - DNA, 2601 bp, Artificial Sequence
  source: /note="Description of Artificial Sequence: Synthetic polynucleotide"
ccatcgacgtcagacgcggaagcttcgatcaactacgcggacaggtaccaaaacaaatgttctcgtcacgtgggcatgaatctgatgctgtttccctgcagacaatgcgagagactgaatcagaattcaaatatctgcttcactcacggtgtcaaagactgtttagagtgctttcccgtgtcagaatctcaacccgtttctgtcgtcaaaaaggcgtatcagaaactgtgctacattcatcacatcatgggaaaggtgccagacgcttgcactgcttgcgacctggtcaatgtggacttggatgactgtgtttctgaacaataaatgacttaaaccaggtatggctgccgatggttatcttccagattggctcgaggacaaccttagtgaaggaattcgcgagtggtgggctttgaaacctggagcccctcaacccaaggcaaatcaacaacatcaagacaacgctcgaggtcttgtgcttccgggttacaaataccttggacccggcaacggactcgacaagggggagccggtcaacgcagcagacgcggcggccctcgagcacgacaaggcctacgaccagcagctcaaggccggagacaacccgtacctcaagtacaaccacgccgacgccgagttccaggagcggctcaaagaagatacgtcttttgggggcaacctcgggcgagcagtcttccaggccaaaaagaggcttcttgaacctcttggtctggttgaggaagcggctaagacggctcctggaaagaagaggcctgtagagcagtctcctcaggaaccggactcctccgcgggtattggcaaatcgggtgcacagcccgctaaaaagagactcaatttcggtcagactggcgacacagagtcagtcccagaccctcaaccaatcggagaacctcccgcagccccctcaggtgtgggatctcttacaatggcttcaggtggtggcgcaccagtggcagacaataacgaaggtgccgatggagtgggtagttcctcgggaaattggcattgcgattcccaatggctgggggacagagtcatcaccaccagcacccgaacctgggccctgcccacctacaacaatcacctctacaagcaaatctccaacagcacatctggaggatcttcaaatgacaacgcctacttcggctacagcaccccctgggggtattttgacttcaacagattccactgccacttctcaccacgtgactggcagcgactcatcaacaacaactggggattccggcctaagcgactcaacttcaagctcttcaacattcaggtcaaagaggttacggacaacaatggagtcaagaccatcgccaataaccttaccagcacggtccaggtcttcacggactcagactatcagctcccgtacgtgctcgggtcggctcacgagggctgcctcccgccgttcccagcggacgttttcatgattcctcagtacgggtatctgacgcttaatgatggaagccaggccgtgggtcgttcgtccttttactgcctggaatatttcccgtcgcaaatgctaagaacgggtaacaacttccagttcagctacgagtttgagaacgtacctttccatagcagctacgctcacagccaaagcctggaccgactaatgaatccactcatcgaccaatacttgtactatctctcaaagactattaacggttctggacagaatcaacaaacgctaaaattcagtgtggccggacccagcaacatggctgtccagggaagaaactacatacctggacccagctaccgacaacaacgtgtctcaaccactgtgactcaaaacaacaacagcgaaattgcttggcctagagcttcttcttgggctctcaatggacgtaatagcttgatgaatcctggacctgctatggccagccacaaagaaggagaggaccgtttctttcctttgtctggatctttaatttttggcaaacaaggaactggaagagacaacgtggatgcggacaaagtcatgataaccaacgaagaagaaattaaaactactaacccagtagcaacggagtcctatggacaagtggccacaaaccaccagagtgcccaagcacaggcgcagaccggctgggttcaaaaccaaggaatacttccgggtatggtttggcaggacagagatgtgtacctgcaaggacccatttgggccaaaattcctcacacggacggcaactttcacccttctccgctgatgggagggtttggaatgaagcacccgcctcctcagatcctcatcaaaaacacacctgtacctgcggatcctccaacggccttcaacaaggacaagctgaactctttcatcacccagtattctactggccaagtcagcgtggagatcgagtgggagctgcagaaggaaaacagcaagcgctggaacccggagatccagtacacttccaactattgcaagtctaataatgttgaatttgctgttaatactgaaggtgtatatagtgaaccccgccccattggcaccagatacctgactcgtaatctgtaattgcttgttaatcaataaaccgtttaattcgtttcagttgaactgcggcc

SEQ ID NO: 594 - DNA, 2601 bp, Artificial Sequence
  source: /note="Description of Artificial Sequence: Synthetic polynucleotide"
ccatcgacgtcagacgcggaagcttcgatcaactacgcggacaggtaccaaaacaaatgttctcgtcacgtgggcatgaatctgatgctgtttccctgcagacaatgcgagagactgaatcagaattcaaatatctgcttcactcacggtgtcaaagactgtttagagtgctttcccgtgtcagaatctcaacccgtttctgtcgtcaaaaaggcgtatcagaaactgtgctacattcatcacatcatgggaaaggtgccagacgcttgcactgcttgcgacctggtcaatgtggacttggatgtctgtgtttctgaacaataaatgacttaaaccaggtatggctgccgatggttatcttccagattggctcgaggacaaccttagtgaaggaattcgcgagtggtgggctttgaaacctggagcccctcaacccaaggcaaatcaacaacatcaagacaacgctcgaggtcttgtgcttccgggttacaaataccttggacccggcaacggactcgataagggggagccggtcaacgcagcagacgcggcggccctcgagcacgacaaggcctacgaccagcagctcaaggccggagacaacccgtacctcaagtacaaccacgccgacgccgagttccaggagcggctcaaagaagatacgtcttttgggggcaacctcgggcgagcagtcttccaggccaaaaagaggcttcttgaacctcttggtctggttgaggaagcggctaagacggctcctggaaagaagaggcctgtagagcagtctcctcaggaaccggactcctccgcgggtattggcaaatcgggtgcacagcccgctaaaaagagactcaatttcggtcagactggcgacacagagtcagtcccagaccctcaaccaatcggagaacctcccgcagccccctcaggtgtgggatctcttacaatggcttcaggtggtggcgcaccagtggcagacaataacgaaggtgccgatggagtgggtagttcctcgggaaattggcattgcgattcccaatggctgggggacagagtcatcaccaccagcacccgaacctgggccctgcccacctacaacaatcacctctacaagcaaatctccaacagcacatctggaggatcttcaaatgacaacgcctacttcggctacagcaccccctgggggtattttgacttcaacagattccactgccacttctcaccacgtgactggcagcgactcatcaacaacaactggggattccggcctaagcgactcaacttcaagctcttcaacattcaggtcaaagaggttacggacaacaatggagtcaagaccatcgccaataaccttaccagcacggtccaggtcttcacggactcagactatcagctcccgtacgtgctcgggtcggctcacgagggctgcctcccgccgttcccagcggacgttttcatgattcctcagtacgggtatctgacgcttaatgatggaagccaggccgtgggtcgttcgtccttttactgcctggaatatttcccgtcgcaaatgctaagaacgggtaacaacttccagttcagctacgagtttgagaacgtacctttccatagcagctacgctcacagccaaagcctggaccgactaatgaatccactcatcgaccaatacttgtactatctctcaaagactattaacggttctggacagaatcaacaaacgctaaaattcagtgtggccggacccagcaacatggctgtccagggaagaaactacatacctggacccagctaccgacaacaacgtgtctcaaccactgtgactcaaaacaacaacagcgaatttgcttggcctagagcttcttcttgggctctcaatggacgtaatagcttgatgaatcctggacctgctatggccagccacaaagaaggagaggaccgtttctttcctttgtctggatctttaatttttggcaaacaaggaactggaagagacaacgtggatgcggacaaagtcatgataaccaacgaagaagaaattaaaactactaacccggtagcaacggagtcctatggacaagtggccacaaaccaccagagtgcccaagcacaggcgcagaccggctgggttcaaaaccaaggaatacttccgggtatggtttggcaggacagagatgtgtacctgcaaggacccatttgggccaaaattcctcacacggacggcaactttcacccttctccgctgatgggagggtttggaatgaagcacccgcctcctcagatcctcatcaaaaacacacctgtacctgcggatcctccaacggccttcaacaaggacaagctgaactctttcatcacccagtattctactggccaagtcagcgtggagatcgagtgggagctgcagaaggaaaacagcaagcgctggaacccggagatccagtacacttccaactattacaagtctaataatgttgaatttgctgttaatactgaaggtgtatatagtgaaccccgccccattggcaccagatacctgactcgtaatctgtaattgcttgttaatcaataaaccgtttaattcgtttcagttgaactgcggcc

SEQ ID NO: 595 - protein, 736 aa, Artificial Sequence
  source: /note="Description of Artificial Sequence: Synthetic polypeptide"
MTADGYLPDWLEDNLSEGIREWWALKPGAPQPKANQQHQDNARGLVLPGYKYLGPGNGLDKGEPVNAADAAALEHDKAYDQQLKAGDNPYLKYNHADAEFQERLKEDTSFGGNLGRAVFQAKKRLLEPLGLVEEAAKTAPGKKRPVEQSPQEPDSSAGIGKSGAQPAKKRLNFGQTGDTESVPDPQPIGEPPAAPSGVGSLTMASGGGAPVADNNEGADGVGSSSGNWHCDSQWLGDRVITTSTRTWALPTYNNHLYKQISNSTSGGSSNDNAYFGYSTPWGYFDFNRFHCHFSPRDWQRLINNNWGFRPKQLNFKLFNIQVKEVTDNNGVKTIANNLTSTVQVFTDSDYQLPYVLGSAHEGCLPPFPADVFMIPQYGYLTLNDGSQAVGRSSFYCLEYFPSQMLRTGNNFQFSYEFENVPFHSSYAHSQSLDRLMNPLIDQYLYYLSKTINGSGQNQQTLKFSVAGPSNMAVQGRNYIPGPSYRQQRVSTTVTQNNNSEFAWPGASSWALNGRNSLMNPGPAMASHKEGEDRFFPLSGSLIFGKQGTGRDNVDADKVMITNEEEIKTTNPVATESYGQVATNHQSAQAQAQTGWVQNQGILPGMVWQDRDVYLQGPIWAKIPHTDGNFHPSPLMGGFGMKHPPPQILIKNTPVPADPPTAFNKDKLNSFITQYSTGQVSVEIEWELQKENSKRWNPEIQYTSNYYKSNNVEFAVNTEGVYSEPRPIGTRYLTRNL

SEQ ID NO: 596 - protein, 736 aa, Artificial Sequence
  source: /note="Description of Artificial Sequence: Synthetic polypeptide"
MAADGYLPDWLEDNLSEGIREWWALKPGAPQPKANQQHQDNARGLVLPGYKYLGPGNGLDKGEPVNAADAAALEHDKAYDQQLKAGDNPYLKYNHADAEFQERLKEDTSFGGNLGRAVFQAKKRLLEPLGLVEEAAKTAPGKKRPVEQSPQEPDSSAGIGKSGAQPAKKRLNFGQTGDTESVPDPQPIGEPPAAPSGVGSLTMASGGGAPVADNNEGADGVGSSSGNWHCDSQWLGDRVITTSTRTWALPTYNNHLYKQISNSTSGGSSNDNAYFGYSTPWGYFDFNRFHCHFSPRDWQRLINNNWGFRPKRLNFKLFNIQVKEVTDNNGVKTIANNLTSTVQVFTDSDYQLPYVLGSAHEGCLPPFPADVFMIPQYGYLTLNDGSQAVGRSSFYCLEYFPSQMLRTGNNFQFSYEFENVPFHSSYAHSQSLDRLMNPLIDQYLYYLSKTINGSGQNQQTLKFSVAGPSNMAVQGRNYIPGPSYRQQRVSTTVTQNNNSEFAWPGASSWALNGRNSLMNPGPAMASHKEGEDRFFPLSGSLIFGKQGTGRDNVDADKVMITNEEEIKTTNPVATESYGQVATNHQSAQAQAQTGWVQNQGILPGMVWQDRDVYLQGPIWAKIPHTGGNFHPSPLMGGFGMKHPPPQILIKNTPVPADPPTAFNKDKLNSFITQYSTGQVSVEIEWELQKENSKRWNPEIQYTSNYYKSNNVEFAVNTGGVYSEPRPIGTRYLTRNL

SEQ ID NO: 597 - protein, 736 aa, Artificial Sequence
  source: /note="Description of Artificial Sequence: Synthetic polypeptide"
MAADGYLPDWLEDNLSEGIREWWALKPGAPQPKANQQHQDNARGLVLPGYKYLGPGNGLDKGEPVNAADAAALEHDKAYDQQLKAGDNPYLKYNHADAEFQERLKEDTSFGGNLGRAVFQAKKRLLEPLGLVEEAAKTAPGKKRPVEQSPQEPDSSAGIDKSGAQPAKKRLNFGQTGDTESVPDPQPIGEPPAAPSGVGSLTMASGGGAPVADNNEGADGVGSSSGNWHCDSQWLGDRVITTSTRTWALPTYNNHLYKQISNSTSGGSSNDNAYFGYSTPWGYFDFNRFHCHFSPRDWQRLINNNWGFRPKRLNFKLFNIQVKEVTDNNGVKTIANNLTSTVQVFTDSDYQLPYVLGSAHEGCLPPFPADVFMIPQYGYLTLNDGSQAVGRSSFYCLEYFPSQMLRTGNNFQFSYEFENVPFHSSYAHSQSLDRLMNPLIDQYLYYLSKTINGSGQNQQTLKFSVAGPSNMAVQGRNYIPGPSYRQQRVSTTVTQNNNSEFAWPGASSWALNGRNSLMNPGPAMASHKEGEDRFFPLSGSLIFGKQGTGRDNVDADKVMITNEEEIKTTNPVATESYGQVATNHQSAQAQAQTGWVQNQGILPGMVWQDRDVYLQGPIWAKIPHTDGNFHPSPLMGGFGMKHPPPQILIKNTPVPADPPTAFNKDKLNSFITQYSTGQVSVEIEWELQKENSKRWNPEIQYTSNYYKSNNVEFAVNTEGVYSEPRPIGTRYLTRNL

SEQ ID NO: 598 - protein, 736 aa, Artificial Sequence
  source: /note="Description of Artificial Sequence: Synthetic polypeptide"
MAADGYLPDWLEDNLSEGIREWWALKPGAPQPKANQQHQDNARGLVLPGYKYLGPGNGLDKGEPVNAADAAALEHDKAYDQQLKAGDNPYLKYNHADAEFQERLKEDTSFGGNLGRAVLQAKKRLLEPLGLVEEAAKTAPGKKRPVEQSPQEPDSSAGIGKSGAQPAKKRLNFGQTGDTESVPDPQPIGEPPAAPSGVGSLTMASGGGAPVADNNEGADGVGSSSGNWHCDSQWLGDRVITTSTRTWALPTYNNHLYKQISNSTSGGSSNDNAYFGYSTPWGYFDFNRFHCHFSPRDWQRLINNNWGFRPKRLNFKLFNIQVKEVTDNNGVKTIANNLTSTVQVFTDSDYQLPYVLGSAHEGCLPPFPADVFMIPQYGYLTLNDGSQAVGRSSFYCLEYFPSQMLRTGNNFQFSYEFENVPFHSSYAHSQSLDRLMNPLIDQYLYYLSKTINGSGQNQQTLKFSVAGSSNMAVQGRNYIPGPSYRQQRVSTTVTQNNNSEFAWPGASSWALNGRNSLMNPGPAMASHKEGEDRFFPLSGSLIFGKQGTGRDNVDADKVMITNEEEIKTTNPVATESYGQVATNHQSAQAQAQTGWVQNQGILPGMVWQDRDVYLQGPIWAKIPHTDGNFHPSPLMGGFGMKHPPPQILIKNTPVPADPPTAFNKDKLNSFITQYSTGQVSVEIEWELQKENSKRWNPEIQYTSNYYKSNNVEFAVNTEGVYSEPRPIGTRYLTRNL

SEQ ID NO: 599 - protein, 736 aa, Artificial Sequence
  source: /note="Description of Artificial Sequence: Synthetic polypeptide"
MAADGYLPDWLEDNLSEGIREWWALKPGAPQPKANQQHQDNARGLVLPGYKYLGPGNGLDKGEPVNAADAAALEHDRAYDQQLKAGDNPYLKYNHADAEFQERLKEDTSFGGNLGRAVFQAKKRLLEPLGLVEEAAKTAPGKKRPVEQSPQEPDSSAGIGKSGAQPAKKRLNFGQTGDTESVPDPQPIGEPPAAPSGVGSLTMASGGGAPVADNNEGADGVGSSSGNWHCDSQWLGDRVITTSTRTWALPTYNNHLYKQISNSTSGGSSNDNAYFGYSTPWGYFDFNRFHCHFSPRDWQRLINNNWGFRPKRLNFKLFNIQVKEVTDNNGVKTIANNLTSTVQVFTDSDYQLPYVLGSAHEGCLPPFPADVFMIPQYGYLTLNDGSQAVGRSSFYCLEYFPSQMLRTGNNFQFSYEFENVPFHSSYAHSQSLDRLMNPLIDQYLYYLSKTINGSGQNQQTLKFSVAGPSNMAVQGRNYIPGPSYRQQRVSTTVTQNNNSEFAWPGASSWALNGRNSLMNPGPAMASHKEGEDRFFPLSGSLIFGKQGTGRDNVDADKVMITNEEEIKTTNPVATESYGQVATNHQSAQAQAQTGWVQNQGILPGMVWQDRDVYLQGPIWAKIPHTDGNFHPSPLMGGFGMKHPPPQILIKNTPVPADPPTAFNKDKLNSFITQYSTGQVSVEIEWELQKKNSKRWNPEIQYTSNYYKSNNVEFAVNTEGVYSEPRPIGTRYLTRNL

SEQ ID NO: 600 - protein, 736 aa, Artificial Sequence
  source: /note="Description of Artificial Sequence: Synthetic polypeptide"
MAADGYLPDWLEDNLSEGIREWWALKPGAPQPKANQQHQDNARGLVLPGYKYLGPGNGLDKGEPVNAADAAALEHDKAYDQQLKAGDNPYLKYNHADAEFQERLKEDTSFGGNLGRAVFQAKKRLLEPLGLVEEAAKTAPGKKRPVEQSPQEPDSSAGIGKSGAQPAKKRLNFGQTGDTESVPDPQPIGEPPAAPSGVGSLTMASGGGAPVADNNEGADGVGSSSGNWHCDSQWLGDRVITTSTRTWALPTYNNHLYKQISNSTSGGSSNDNAYFGYSTPWGYFDFNRFHCHFSPRDWQRLINNNWGFRPKRLNFKLFNIQVKEVTDNNGVKTIANNLTSTVQVFTDSDYQLPYVLGSAHEGCLPPFPADVFMIPQYGYLTLNDGSQAVGRSSFYCLEYFPSQMLRTGNNFQFSYEFENVPFHSSYAHSQSLDRLMNPLIDQYLYYLSKTINGSGQNQQTLKFSVAGPSNMAVQGRNYIPGPSYRQQRVSTTVTQNNNSEFAWPGASSWALNGRNSLMNPGPAMASHKEGEDRFFPLSGSLIFGKQGTGRDNVDADKVMITNEEEIKTTNPVATESYGQVATNHQSAQARAQTGWVQNQGILPGMVWQDRDVYLQGPIWAKIPHTDGNFHPSPLMGGFGMKHPPPQILIKNTPVPADPPTAFNKDKLNSFITQYSTGQVSVEIEWELQKENSKRWNPEIQYTSNYYKSNNVEFAVNTEGVYSEPRPIGTRYLTRNL

SEQ ID NO: 601 - protein, 736 aa, Artificial Sequence
  source: /note="Description of Artificial Sequence: Synthetic polypeptide"
MAADGYLPDWLEDNLSEGIREWWALKPGAPQPKANQQHQDNARGLVLPGYKYLGPGNGLDKGEPVNAVDAAALEHDKAYDQQLKAGDNPYLKYNHADAEFQERLKEDTSFGGNLGRAVFQAKKRLLEPLGLVEEAAKTAPGKKRPVEQSPQEPDSSAGIGKSGAQPAKKRLNFGQTGDTESVPDPQPIGEPPAAPSGVGSLTMASGGGAPVADNNEGADGVGSSSGNWHCDSQWLGDRVITTSTRTWALPTYNNHLYKQISNSTSGGSSNDNAYFGYSTPWGYFDFNRFHCHFSPRDWQRLINNNWGFRPKRLNFKLFNIQVKEVTDNNGVKTIANNLTSTVQVFTDSDYQLPYVLGSAHEGCLPPFPADVFMIPQYGYLTLNDGSQAVGRSSFYCLEYFPSQMLRTGNNFQFSYEFENVPFHSSYAHSQSLDRLMNPLIDQYLYYLSKTINGSGQNQQTLKFSVAGPSNMAVQGRNYIPGPSYRQQRVSTTVTQNNNSEFAWPGASSWALNGRNSLMNPGPAMASHKEGEDRFFPLSGSLIFGKQGTGRDNVDADKVMITNEEEIKTTNPVATESYGQVATNHQSAQAQAQTGWVQNQGILPGMVWQDRDVYLQGPIWAKIPHTDGNFHPSPLMGGFGMKHPPPQILIKNTPVPADPPTAFNKDKLNSFITQYSTGQVSVEIEWELQKENSKRWNPEIQYTSNYYKSNNVEFAVNTEGVYSEPRPIGTRYLTRNL

SEQ ID NO: 602 - protein, 736 aa, Artificial Sequence
  source: /note="Description of Artificial Sequence: Synthetic polypeptide"
MAADGYLPDWLEDNLSEGIREWWALKPGAPQPKANQQHQDNARGLVLPGYKYLGPGNGLDKGEPVNAADAAALEHDKAYDQQLKAGDNPYLKYNHADAEFQERLKEDTSFGGNLGRAVFQAKKRLLEPLGLVEEAAKTAPGKKRPVEQSPREPDSSAGIGKSGAQPAKKRLNFGQTGDTESVPDPQPIGEPPAAPSGVGSLTMASGGGAPVADNNEGADGVGSSSGNWHCDSQWLGDRVITTSTRTWALPTYNNHLYKQISNSTSGGSSNDNAYFGYSTPWGYFDFNRFHCHFSPRDWQRLINNNWGFRPKRLNFKLFNIQVKEVTDNNGVKTIANNLTSTVQVFTDSDYQLPYVLGSAHEGCLPPFPADVFMIPQYGYLTLNDGSQAVGRSSFYCLEYFPSQMLRTGNNFQFSYEFENVPFHSSYAHSQSLDRLMNPLIDQYLYYLSKTINGSGQNQQTLKFSVAGPSNMAVQGRNYIPGPSYRQQRVSTTVTQNNNSEFAWPGASSWALNGRNSLMNPGPAMASHKEGEDRFFPLSGSLIFGKQGTGRDNVDADKVMITNEEEIKTTNPVATESYGQVATNHQSAQAQAQTGWVQNQGILPGMVWQDRDVYLQGPIWAKIPHTDGNFHPSPLMGGFGMKHPPPQILIKNTPVPADPPTAFNKDKLNSFITQYSTGQVSVEIEWELQKENSKRWNPEIQYTSNYYKSNNVEFAVNTEGVYSEPRPIGTRYLTRNL

SEQ ID NO: 603 - protein, 736 aa, Artificial Sequence
  source: /note="Description of Artificial Sequence: Synthetic polypeptide"
MAADGYLPDWLEDNLSEGIREWWALKPGAPQPKANQQHQDNARGLVLPGYKYLGPGNGLDKGEPVNAADAAALEHDKAYDQQLKAGDNPYLKYNHADAEFQERLKEDTSFGGNLGRAVFQAKKRLLEPLGLVEEAAKTAPGKKRPVEQSPQEPDSSAGIGKSGAQPAKKRLNFGQTGDTESVPDPQPIGEPPAAPSGVGSLTMASCGGAPVADNNEGADGVGSSSGNWHCDSQWLGDRVITTSTRTWALPTYNNHLYKQISNSTSGGSSNDNAYFGYSTPWGYFDFNRFHCHFSPRDWQRLINNNWGFRPKRLNFKLFNIQVKEVTDNNGVKTIANNLTSTVQVFTDSDYQLPYVLGSAHEGCLPPFPADVFMIPQYGYLTLNDGSQAVGRSSFYCLEYFPSQMLRTGNNFQFSYEFENVPFHSSYAHSQSLDRLMNPLIDQYLYYLSKTINGSGQNQQTLKFSVAGPSNMAVQGRNYIPGPSYRQQRVSTTVTQNNNSEFAWPGASSWALNGRNSLMNPGPAMASHKEGEDRFFPLSGSLIFGKQGTGRDNVDADKVMITNEEEIKTTNPVATESYGQVATNHQSAQAQAQTGWVQNQGILPGMVWQDRDVYLQGPIWAKIPHTDGNFHPSPLMGGFGMKHPPPQILIKNTPVPADPPTAFNKDKLNSFITQYSTGQVSVEIEWELQKENSKRWNPEIQYTSNYYKSNNVEFAVNTEGVYSEPRPIGTRYLTRNL

SEQ ID NO: 604 - protein, 736 aa, Artificial Sequence
  source: /note="Description of Artificial Sequence: Synthetic polypeptide"
MAADGYLPDWLEDNLSEGIREWWALKPGAPQPKANQQHQDNARGLVLPGYKYLGPGNGLDKGEPINAADAAALEHDKAYDQQLKAGDNPYLKYNHADAEFQERLKEDTSFGGNLGRAVFQAKKRLLEPLGLVEEAAKTAPGKKRPVEQSPQEPDSSAGIGKSGAQPAKKRLNFGQTGDTESVPDPQPIGEPPAAPSGVGSLTMASGGGAPVADNNEGADGVGSSSGNWHCDSQWLGDRVITTSTRTWALPTYNNHLYKQISNSTSGGSSNDNAYFGYSTPWGYFDFNRFHCHFSPRDWQRLINNNWGFRPKRLNFKLFNIQVKEVTDNNGVKTIANNLTSTVQVFTDSDYQLPYVLGSAHEGCLPPFPADVFMIPQYGYLTLNDGSQAVGRSSFYCLEYFPSQMLRTGNNFQFSYEFENVPFHSSYAHSQSLDRLMNPLIDQYLYYLSKTINGSGQNQQTLKFSVAGPSNMAVQGRNYIPGPSYRQQRVSTTVTQNNNSEFAWPGASSWALNGRNSLMNPGPAMASHKEGEDRFFPLSGSLIFGKQGTGRDNVDADKVMITNEEEIKTTNPVATESYGQVATNHQSAQAQAQTGWVQNQGILPGMVWQDRDVYLQGPIWAKIPHTYGNFHPSPLMGGFGMKHPPPQILIKNTPVPADPPTAFNKDKLNSFITQYSTGQVSVEIEWELQKENSKRWNPEIQYTSNYYKSNNVEFAVNTEGVYSEPRPIGTRYLTRNL

SEQ ID NO: 605 - protein, 736 aa, Artificial Sequence
  source: /note="Description of Artificial Sequence: Synthetic polypeptide"
MAADGYLPDWLEDNLSEGIREWWALKPGAPQPKANQQHQDNARGLVLPGYKYLGPGNGLDKGEPVNAADAAALEHDKAYDQQLKAGDNPYLKYNHADAEFQERLKEDTSFGGNLGRAVFQAKKRLLEPLGLVEEAAKTAPGKKRPVEQSPQEPDSSAGIGKSGAQPAKKRLNFGQTGDTESVPDPQPIGEPPAAPSGVGSLTMASGGGAPVADNNEGADGVGSSSGNWHCDSQWLGDRVITTSTRTWALPTYNNHLYKQISNSTSGGSSNDNAYFGYSTPWGYFDFNRFHCHFSPHDWQRLINNNWGFRPKRLNFKLFNIQVKEVTDNNGVKTIANNLTSTVQVFTDSDYQLPYVLGSAHEGCLPPFPADVFMIPQYGYLTLNDGSQAVGRSSFYCLEYFPSQMLRTGNNFQFSYEFENVPFHSSYAHSQSLDRLMNPLIDQYLYYLSKTINGSGQNQQTLKFNVAGPSNMAVQGRNYIPGPSYRQQRVSTTVTQNNNSEFAWPRASSWALNGRNSLMNPGPAMASHKEGEDRFFPLSGSLIFGKQGTGRDNVDADKVMITNEEEIKTTNPVATESYGQVATNHQSAQAQAQTGWVQNQGILPGMVWQDRDVYLQGPIWAKIPHTDGNFHPSPLMGGFGMKHPPPQILIKNTPVPADPPTAFNKDKLNSFITQYSTGQVSMEIEWELQKENSKRWNPEIQYTSNYYKSNNVEFAVNTEGVYSEPRPIGTRYLTRNL

SEQ ID NO: 606 - protein, 736 aa, Artificial Sequence
  source: /note="Description of Artificial Sequence: Synthetic polypeptide"
MAADGYLPDWLEDNLSEGIREWWALKPGAPQPKANQQHQDNARGLVLPGYKYLGPGNGLDKGEPVNAADAAALEHDKAYDQQLKAGDNPYLKYNHADAEFQERLKEDTSFGGNLGRAVFQAKKRLLEPLGLVEEAAKTAPGKKRPVEQSPQEPDSSAGIGKSGAQPAKKRLNFGQTGDTESVPDPQPIGEPPAAPSGVGSLTMASGGGAPVADNNEGADGVGSSSGNWHCDSQWLGDRVITTSTRTWALPTYNNHLYKQISNSTSGGSSNDNAYFGYSTPWGYFDFNRFHCHFSPRDWQRLINNNWGFRPKRLNFKLFNIQVKEVTDNNGVKTIANNLTSTVQVFTDSDYQLPYVLGSAHEGCLPPFPADVFMIPQYGYLTLNDGSQAVGRSSFYCLEYFPSQMLRTGNNFQFSYEFENVPFHSSYAHSQSLDRLMNPLIDQYLYYLSKTINGSGQNQQTLKFSVAGPSNMAVQGRNYIPGPSYRQQRVSTTVTQNNNSEFAWPRASSWALNGRNSLMNPGPAMASHKEGEDRFFPLSGSLIFGKQGTGRDNVDADKVMITNEEEIKTTNPVATESYGQVATNHQSAQAQAQTGWVQNQGILPGMVWQDRDVYLQGPIWAKIPHTDGNFHPSPLMGGFGMKHPPPQILIKNTPVPADPPTAFNKDKLNSFITQYSTGQVSVEIEWELQKENSKRWNPEIQYTSNYYKSNNVEFAVNTEGVYSEPRPIGTRYLTRNL

SEQ ID NO: 607 - protein, 736 aa, Artificial Sequence
  source: /note="Description of Artificial Sequence: Synthetic polypeptide"
MAADGYLPDWLEDNLSEGIREWWALKPGAPQPKANQQHQDNARGLVLPGYKYLGPGNGLDKGEPVNAADAAALEHDKAYDQQLKAGDNPYLKYNHADAEFQERLKEDTSFGGNLGRAVFQAKKRLLEPLGLVEEAAKTAPGKKRPVEQSPQEPDSSAGIGKSGAQPAKKRLNFGQTGDTESVPDPQPIGEPPAAPSGVGSLTMASGGGAPVADNNEGADGVGSSSGNWHCDSQWLGDRVITTSTRTWALPTYNNHLYKQISNSTSGGSSNDNAYFGYSTPWGYFDFNRFHCHFSPRDWQRLINNNWGFRPKRLNFKLFNIQVKEVTDNNGVKTIANNLTSTVQVFTDSDYQLPYVLGSAHEGCLPPFPADVFMIPQYGYLTLNDGSQAVGRSSFYCLEYFPSQMLRTGNNFQFSYEFENVPFHSSYAHSQSLDRLMNPLIDQYLYYLSKTINGSGQNQQTLKFSVAGPSNMAVQGRNYIPGPSYRQQRVSTTVTQNNNSEFAWPRASSWALNGRNSLMNPGPAMASHKEGEDRFFPLSGSLIFGKQGTGRDNVDADKVMITNEEEIKTTNPVATESYGQVATNHQSAQAQAQTGWVQNQGILPGMVWQDRDVYLQGPIWAKIPHTDGNFHPSPLMGGFGMKHPPPQILIKNTPVPADPPTAFNKDKLNSFITQYSTGQVSVEIEWERQKENSKRWNPEIQYTSNYYKSNNVEFAVNTEGVYSEPRPIGTRYLTRNL

SEQ ID NO: 608 - protein, 736 aa, Artificial Sequence
  source: /note="Description of Artificial Sequence: Synthetic polypeptide"
MAADGYLPDWLEDNLSEGIREWWALKPGAPQPKANQQHQDNARGLVLPGYKYLGPGNGLDKGEPVNAADAAALEHDKAYDQQLKAGDNPYLKYNHADAEFQERLKEDTSFGGNLGRAVFQAKKRLLEPLGLVEEAAKTAPGKKRPVEQSPQEPDSSAGIGKSGAQPAKKRLNFGQTGDTESVPDPQPIGEPPAAPSGVGSLTMASGGGAPVADNNEGADGVGSSSGNWHCDSQWLGDRVITTSTRTWALPTYNNHLYKQISNSTSGGSSNDNAYFGYSTPWGYFDFNRFHCHFSPRDWQRLINNNWGFRPKRLNFKLFNIQVKEVTDNNGVKTIANNLTSTVQVFADSDYQLPYVLGSAHEGCLPPFPADVFMIPQYGYLTLNDGSQAVGRSSFYCLEYFPSQMLRTGNNFQFSYEFENVPFHSSYAHSQSLDRLMNPLIDQYLYYLSKTINGSGQNQQTLKFSVAGPSNMAVQGRNYIPGPSYRQQRVSTTVTQNNNSEFAWPRASSWALNGRNSLMNPGPAMASHKEGEDRFFPLSGSLIFGKQGTGRDNVDADKVMITNEEEIKTTNPVATESYGQVATNHQSAQAQAQTGWVQNQGILPGMVWQDRDVYLQGPIWAKIPHTDGNFHPSPLMGGFGMKHPPPQILIKNTPVPADPPTAFNKDKLNSFITQYSTGQVSVEIEWELQKENSKRWNPEIQYTSNYYKSNNVEFAVNTEGVYSEPRPIGTRYLTRNL

SEQ ID NO: 609 - protein, 736 aa, Artificial Sequence
  source: /note="Description of Artificial Sequence: Synthetic polypeptide"
MAADGYLPDWLEDNLSEGIREWWALKPGAPQPKANQQHQDNARGLVLPGYKYLGPGNGLDKGEPVNAADAAALEHDKAYDQQLKAGDNPYLKYNHADAEFQERLKEDTSFGGNLGRAVFQAKKRLLEPLGLVEEAAKTAPGKKRPVEQSPQEPDSSAGIGKSGAQPAKKRLNFGQTGDTESVPDPQPIGEPPAAPSGVGSLTMASGGGAPVADNNEGADGVGSSSGNWHCDSQWLGDRVITTSTRTWALPTYNNHLYKQISNSTSGGSSNDNAYFGYSTPWGYFDFNRFHCHFSPRDWQRLINNNWGFRPKRLNFKLFNIQVKEVTDNNGVKTIANNLTSTVQVFTDSDYQLPYVLGSAHEGCLPPFPADVFMIPQYGYLTLNDGSQAVGRSSFYCLEYFPSQMLRTGNNFQFSYEFENVPFHSSYAHSQSLDRLMNPLIDQYLYYLSKTINGSGQNQQTLKFSVAGPSNMAVQGRNYIPGPSYRQQRVSTTVTQNNNSEIAWPRASSWALNGRNSLMNPGPAMASHKEGEDRFFPLSGSLIFGKQGTGRDNVDADKVMITNEEEIKTTNPVATESYGQVATNHQSAQAQAQTGWVQNQGILPGMVWQDRDVYLQGPIWAKIPHTDGNFHPSPLMGGFGMKHPPPQILIKNTPVPADPPTAFNKDKLNSFITQYSTGQVSVEIEWELQKENSKRWNPEIQYTSNYCKSNNVEFAVNTEGVYSEPRPIGTRYLTRNL

SEQ ID NO: 610 - protein, 736 aa, Artificial Sequence; identical to SEQ ID NO: 606
  source: /note="Description of Artificial Sequence: Synthetic polypeptide"

SEQ ID NO: 611 - DNA, 2208 bp, Artificial Sequence
  source: /note="Description of Artificial Sequence: Synthetic polynucleotide"
atggctgccgatggttatcttccagattggctcgaggacaaccttagtgaaggaattcgcgagtggtgggctttgaaacctggagcccctcaacccaaggcaaatcaacaacatcaagacaacgctcgaggtcttgtgcttccgggttacaaataccttggacccggcaacggactcgacaagggggagccggtcaacgcagcagacgcggcggccctcgagcacgacaaggcctacgaccagcagctcaaggccggagacaacccgtacctcaagtacaaccacgccgacgccgagttccaggagcggctcaaagaagatacgtcttttgggggcaacctcgggcgagcagtcttccaggccaaaaagaggcttcttgaacctcttggtctggttgaggaagcggctaagacggctcctggaaagaagaggcctgtagagcagtctcctcaggaaccggactcctccgcgggtattggcaaatcgggtgcacagcccgctaaaaagagactcaatttcggtcagactggcgacacagagtcagtcccagaccctcaaccaatcggagaacctcccgcagccccctcaggtgtgggatctcttacaatggcttcaggtggtggcgcaccagtggcagacaataacgaaggtgccgatggagtgggtagttcctcgggaaattggcattgcgattcccaatggctgggggacagagtcatcaccaccagcacccgaacctgggccctgcccacctacaacaatcacctctacaagcaaatctccaacagcacatctggaggatcttcaaatgacaacgcctacttcggctacagcaccccctgggggtattttgacttcaacagattccactgccacttctcaccacgtgactggcagcgactcatcaacaacaactggggattccggcctaagcgactcaacttcaagctcttcaacattcaggtcaaagaggttacggacaacaatggagtcaagaccatcgccaataaccttaccagcacggtccaggtcttcacggactcagactatcagctcccgtacgtgctcgggtcggctcacgagggctgcctcccgccgttcccagcggacgttttcatgattcctcagtacgggtatctgacgcttaatgatggaagccaggccgtgggtcgttcgtccttttactgcctggaatatttcccgtcgcaaatgctaagaacgggtaacaacttccagttcggctacgagtttgagaacgtacctttccatagcagctacgctcacagccaaagcctggaccgactaatgaatccactcatcgaccaatacttgtactatctctcaaagactattaacggttctggacagaatcaacaaacgctaaaattcagtgtggccggacccagcaacatggctgtccagggaagaaactacatacctggacccagctaccgacaacaacgtgtctcaaccactgtgactcaaaacaacaacagcgaatttgcttggcctggagcttcttcttgggctctcaatggacgtaatagcttgatgaatcctggacctgctatggccagccacaaagaaggagaggaccgtttctttcctttgtctggatctttaatttttggcaaacaaggaactggaagagacaacgtggatgcggacaaagtcatgataaccaacgaagaagaaattaaaactactaacccggtagcaacggagtcctatggacaagtggccacaaaccaccagagtgcccaagcacaggcgcagaccggctgggttcaaaaccaaggaatacttccgggtatggtttggcaggacagagatgtgtacctgcaaggacccatttgggccaaaattcctcacacggacggcaactttcacccttctccgctgatgggagggtttggaatgaagcacccgcctcctcagatcctcatcaaaaacacacctgtacctgcggatcctccaacggccttcaacaaggacaagctgaactctttcatcacccagtattctactggccaagtcagcgtggagatcgagtgggagctgcagaaggaaaacagcaagcgctgggacccggagatccagtacacttccaactattacaagtctaataatgttgaatttgctgttaatactgaaggtgtatatagtgaaccccgccccattggcaccagatacctgactcgtaatctg

SEQ ID NO: 612 - DNA, 2208 bp, Artificial Sequence
  source: /note="Description of Artificial Sequence: Synthetic polynucleotide"
atggctgccgatggttatcttccagattggctcgaggacaaccttagtgaaggaattcgcgagtggtgggctttgaaacctggagcccctcaacccaaggcaaatcaacaacatcaagacaacgctcgaggtcttgtgcttccgggttacaaataccttggacccggcaacggactcgacaagggggagccggtcaacgcagcagacgcggcggccctcgagcacgacaaggcctacgaccagcagctcaaggccggagacaacccgtacctcaagtacaaccacgccgacgccgagttccaggagcggctcaaagaagatacgtcttttgggggcaacctcgggcgagcagtcttccaggccaaaaagaggcttcttgaacctcttggtctggttgaggaagcggctaagacggctcctggaaagaagaggcctgtagagcagtctcctcaggaaccggactcctccgcgggtattggcaaatcgggtgcacagcccgctaaaaagagactcaatttcggtcagactggcgacacagagtcagtcccagaccctcaaccaatcggagaacctcccgcagccccctcaggtgtgggatctcttacaatggcttcaggtggtggcgcaccagtggcagacaataacgaaggtgccgatggagtgggtagttcctcgggaaattggcattgcgattcccaatggctgggggacagagtcatcaccaccagcacccgaacctgggccctgcccacctacaacaatcacctctacaagcaaatctccaacagcacatctggaggatcttcaaatgacaacgcctacttcggctacagcaccccctgggggtattttgacttcaacagattccactgccgcttctcaccacgtgactggcagcgactcatcaacaacaactggggattccggcctaagcgactcaacttcaagctcttcaacattcaggtcaaagaggttacggacaacaatggagtcaagaccatcgccaataaccttaccagcacggtccaggtcttcacggactcagactatcagctcccgtacgtgctcgggtcggctcacgagggctgcctcccgccgttcccagcggacgttttcatgattcctcagtacgggtatctgacgcttaatgatggaagccaggccgtgggtcgttcgtccttttactgcctggaatatttcccgtcgcaaatgctaagaacgggtaacaacttccagttcagctacgagtttgagaacgtacctttccatagcagctacgctcacagccaaagcctggaccgactaatgaatccactcatcgaccaatacttgtactatctctcaaagactattaacggttctggacagaatcaacaaacgctaaaattcagtgtggccggacccagcaacatggctgtccagggaagaaactacatacctggacccagctaccgacaacaacgtgtctcaaccactgtgactcaaaacaacaacagcgaatttgcttggcctggagcttcttcttgggctctcaatggacgtaatagcttgatgaatcctggacctgctatggccagccacaaagaaggagaggaccgtttctttcctttgtctggatctttaatttttggcaaacaaggaactggaagagacaacgtggatgcggacaaagtcatgataaccaacgaagaagaaattaaaactactaacccggtagcaacggagtcctatggacaagtggccacaaaccaccagagtgcccaagcacaggcgcagaccggctgggttcaaaaccaaggaatacttccgggtatggtttggcaggacagagatgtgtacctgcaaggacccatttgggccaaaattcctcacacggacggcaactttcacccttctccgctgatgggagggtttggaatgaagcacccgcctcctcagatcctcatcaaaaacgcccctgtacctgcggatcctccaacggccttcaacaaggacaagctgaactctttcatcacccagtattctactggccaagtcagcgtggagatcgagtgggagctgcagaaggaaaacagcaagcgctggaacccggagatccagtacacttccaactattacaagtctaataatgttgaatttgctgttaatactgaaggtgtatatagtgaaccccgccccattggcaccagatacctgactcgtaatctg

SEQ ID NO: 613 - DNA, 2208 bp, Artificial Sequence
  source: /note="Description of Artificial Sequence: Synthetic polynucleotide"
atggctgccgatggttatcttccagattggctcgaggacaaccttagtgaaggaattcgcgagtggtgggctttgaaacctggagcccctcaacccaaggcaaatcaacaacatcaagacaacgctcgaggtcttgtgcttccgggttacaaataccttggacccggcaacggactcgacaagggggagccggtcagcgcagcagacgcggcggccctcgagcacgacaaggcctacgaccagcagctcaaggccggagacaacccgtacctcaagtacaaccacgccgacgccgagttccaggagcggctcaaagaagatacgtcttttgggggcaacctcgggcgagcagtcttccaggccaaaaagaggcttcttgaacctcttggtctggttgaggaagcggctaagacggctcctggaaagaagaggcctgtagagcagtctcctcaggaaccggactcctccgcgggtattggcaaatcgggtgcacagcccgctaaaaagagactcaatttcggtcagactggcgacacagagtcagtcccagaccctcaaccaatcggagaacctcccgcagccccctcaggtgtgggatctcttacaatggcttcaggtggtggcgcaccagtggcagacaataacgaaggtgccgatggagtgggtagttcctcgggaaattggcattgcgattcccaatggctgggggacagagtcatcaccaccagcacccgaacctgggccctgcccacctacaacaatcacctctacaagcaaatctccaacagcacatctggaggatcttcaaatgacaacgcctacttcggctacagcaccccctgggggtattttgacttcaacagattccactgccacttctcaccgcgtgactggcagcgactcatcaacaacaactggggattccggcctaagcgactcaacttcaagctcttcaacattcaggtcaaagaggttacggacaacaatggagtcaagaccatcgccaataaccttaccagcacggtccaggtcttcacggactcagactatcagctcccgtacgtgctcgggtcggctcacgagggctgcctcccgccgttcccagcggacgttttcatgattcctcagtacgggtatctgacgcttaatgatggaagccaggccgtgggtcgttcgtccttttactgcctggaatatttcccgtcgcaaatgctaagaacgggtaacaacttccagttcagctacgagtttgagaacgtacctttccatagcagctacgctcacagccaaagcctggaccgactaatgaatccactcatcgaccaatacttgtactatctctcaaagactattaacggttctggacagaatcaacaaacgctaaaattcagtgtggccggacccagcaacatggctgtccagggaagaaactacatacctggacccagctaccgacaacaacgtgtctcaaccactgtgactcaaaacaacaacagcgaatttgcttggcctggagcttcttcttgggctctcaatggacgtaatagcttgatgaatcctggacctgctatggccagccacaaagaaggagaggaccgtttctttcctttgtctggatctttaatttttggcaaacaaggaactggaagagacaacgtggatgcggacaaagtcatgataaccaacgaagaagaaattaaaactactaacccggtagcaacggagtcctatggacaagtggccacaaaccaccagagtgcccaagcacaggcgcagaccggctgggttcaaaaccaaggaatacttccgggtatggtttggcaggacagagatgtgtacctgcaaggacccatttgggccaaaattcctcacacggacggcaactttcacccttctccgctgatgggagggtttggaatgaagcacccgcctcctcagatcctcatcaaaaacacacctgtacctgcggatcctccaacggccttcaacaaggacaagctgaactctttcatcacccagtattctactggccaagtcagcgtggagatcgagtgggagctgcagaaggaaaacagcaagcgctggaacccggagatccagtacacttccaactattacaagtctaataatgttgaatttgctgttaatactgaaggtgtatatagtgaaccccgccccattggcaccagatacctgactcgtaatctg

SEQ ID NO: 614 - DNA, 2208 bp, Artificial Sequence
  source: /note="Description of Artificial Sequence: Synthetic polynucleotide"
atggctgccgatggttatcttccagattggctcgaggacaaccttagtgaaggaattcgcgagtggtgggctttgaaacctggagcccctcaacccaaggcaaatcaacaacatcaagacaacgctcgaggtcttgtgcttccgggttacaaataccttggacccggcaacggactcgacaagggggagccggtcaacgcagcagacgcggcggccctcgagcacgacaaggcctacgaccagcagctcaaggccggagacaacccgtacctcaagtacaaccacgccgacgccgagttccaggagcggctcaaagaagatacgtcttttgggggcaacctcgggcgagcagtcttccaggccaaaaagaggcttcttgaacctcttggtctggttgaggaagcggctaagacggctcctggaaagaagaggcctgtagagcagtctcctcaggaaccggactcctccgcgggtattggcaaatcgggtgcacagcccgctaaaaagagactcaatttcggtcagactggcgacacagagtcagtcccagaccctcaaccaatcggagaacctcccgcagccccctcaggtgtgggatctcttacaatggcttcaggtggtggcgcaccagtggcagacaataacgaaggtgccgatggagtgggtagttcctcgggaaattggcattgcgattcccaatggctgggggacagagtcatcaccaccagcacccgaacctgggccctgcccacctacaacaatcacctctacaagcaaatctccaacagcacatctggaggatcttcaaatgacaacgcctacttcggctacagcaccccctgggggtattttgacttcaacagattccactgccacttctcaccacgtgactggcagcgactcatcaacaacaactggggattccggcctaagcgactcaacttcaagctcttcaacattcaggtcaaagaggttacggacaacaatggagtcaagaccatcgccaataaccttaccagcacggtccaggtcttcacggactcagactatcagctcccgtacgtgctcgggtcggctcacgagggctgcctcccgccgttcccagcggacgttttcatgattcctcagtacgggtatctgacgcttaatgatggaagccaggccgtgggtcgttcgtccttttactgcctggaatatttcccgtcgcaaatgctaagaacgggtaacaacttccagttcagctacgagtttgagaacgtacctttccatagcagctacgctcacagccaaagcctggaccgactaatgaatccactcatcgaccaatacttgtactatctctcaaagactattaacggttctggacagaatcaacaaacgctaaaattcagtgtggccggacccagcaacacggctgtccagggaagaaactacatacctggacccagctaccgacaacaacgtgtctcaaccactgtgactcaaaacaacaacagcgaatttgcttggcctggagcttcttcttgggctctcaatggacgtaatagcttgatgaatcctggacctgctatggccagccacaaagaaggagaggaccgtttctttcctttgtctggatctttaatttttggcaaacaaggaactggaagagacaacgtggatgcggacaaagtcatgataaccaacgaagaagaaattaaaactactaacccggtagcaacggagtcctatggacaagtggccacaaaccaccagagtgcccaagcacaggcgcagaccggctgggttcaaaaccaaggaatacttccgggtatggtttggcaggacagagatgtgtacctgcaaggacccatttgggccaaaattcctcacacggacggcaactttcacccttctccgctgatgggagggtttggaatgaagcacccgcctcctcagatcctcatcaaaaacacacctgtacctgcggatcctccaacggccttcaacaaggacaagctgaactctttcatcacccagtattctactggccaagtcagcgtggagatcgagtgggagctgcagaaggaaaacagcaagcgctggaacccggagatccagtacacttccaactattacaagtctaataatgttgaatttgctgttaatactgaaggtgtatatagtgaaccccgccccattggcaccagatacctgactcgtaatctg

SEQ ID NO: 615 - DNA, 2208 bp, Artificial Sequence
  source: /note="Description of Artificial Sequence: Synthetic polynucleotide"
atggctgccgatggttatcttccagattggctcgaggacaaccttagtgaaggaattcgcgagtggtgggctttgaaacctggagcccctcaacccaaggcaaatcaacaacatcaagacaacgctcgaggtcttgtgcttccgggttacaaataccttggacccggcaacggactcgacaagggggagccggtcaacgcagcagacgcggcggccctcgagcacgacaaggcctacgaccagcagctcaaggccggagacaacccgtacctcaagtacaaccacgccgacgccgagttccaggagcggctcaaagaagatacgtcttttgggggcaacctcgggcgagcagtcttccaggccaaaaagaggcttcttgaacctcttggtctggttgaggaagcggctaagacggctcctggaaagaagaggcctgtagagcagtctcctcaggaaccggactcctccgcgggtattggcaaatcgggtgcacagcccgctaaaaagagactcaatttcggtcagactggcgacacagagtcagtcccagaccctcaaccaatcggagaacctcccgcagccccctcaggtgtgggatctcttacaatggcttcaggtggtggcgcaccagtggcagacaataacgaaggtgccgatggagtgggtagttcctcgggaaattggcattgcgattcccaatggctgggggacagagtcatcaccaccagcacccgaacctgggccctgcccacctacaacaatcacctctacaagcaaatctccaacagcacatctggaggatcttcaaatgacaacgcctacttcggctacagcaccccctgggggtattttgacttcaacagattccactgccacttctcaccacgtgactggcagcgactcatcaacaacaactggggattccggcctaagcggctcaacttcaagctcttcaacattcaggtcaaagaggttacggacaacaatggagtcaagaccatcgccaataaccttaccagcacggtccaggtcttcacggactcagactatcagctcccgtacgtgctcgggtcggctcacgagggctgcctcccgccgttcccagcggacgttttcatgattcctcagtacgggtatctgacgcttaatgatggaagccaggccgtgggtcgttcgtccttttactgcctggaatatttcccgtcgcaaatgctaagaacgggtagcaacttccagttcagctacgagtttgagaacgtacctttccatagcagctacgctcacagccaaagcctggaccgactaatgaatccactcatcgaccaatacttgtactatctctcaaagactattaacggttctggacagaatcaacaaacgctaaaattcagtgtggccggacccagcaacatggctgtccagggaagaaactacatacctggacccagctaccgacaacaacgtgtctcaaccactgtgactcaaaacaacaacagcgaatttgcttggcctggagcttcttcttgggctctcaatggacgtaatagcttgatgaatcctggacctgctatggccagccacaaagaaggagaggaccgtttctttcctttgtctggatctttaatttttggcaaacaaggaactggaagagacaacgtggatgcggacaaagtcatgataaccaacgaagaagaaattaaaactactaacccggcagcaacggagtcctatggacaagtggccacaaaccaccagagtgcccaagcacaggcgcagaccggctgggttcaaaaccaaggaatacttccgggtatggtttggcaggacagagatgtgtacctgcaaggacccatttgggccaaaattcctcacacggacggcaactttcacccttctccgctgatgggagggtttggaatgaagcacccgcctcctcagatcctcatcaaaaacacacctgtacctgcggatcctccaacggccttcaacaaggacaagctgaactctttcatcacccagtattctactggccaagtcagcgtggagatcgagtgggagctgcagaaggaaaacagcaagcgctggaacccggagatccagcacacttccaactattacaagtctaataatgttgaatttgctgttaatactgaaggtgtatatagtgaaccccgccccattggcaccagatacctgactcgtaatctg

SEQ ID NO: 616 - DNA, 2208 bp, Artificial Sequence
  source: /note="Description of Artificial Sequence: Synthetic polynucleotide"
atggctgccgatggttatcttccagattggctcgaggacaaccttagtgaaggaattcgcgagtggtgggctttgaaacctggagcccctcaacccaaggcaaatcaacaacatcaagacaacgctcgaggtcttgtgcttccgggttacaaataccttggacccggcaacggactcgacaagggggagccggtcaacgcagcagacgcggcggccctcgagcacgacaaggcctacgaccagcagctcaaggccggagacaacccgtacctcaagtacaaccacgccgacgccgagttccaggagcggctcaaagaagatacgtcttttgggggcaacctcgggcgagcagtcttccaggccaaaaagaggcttcttgaacctcttggtctggttgaggaagcggctaagacggctcctggaaagaagaggcctgtagagcagtctcctcaggaaccggactcctccgcgggtattggcaaatcgggtgcacagcccgctaaaaagagactcaatttcggtcagactggcgacacagagtcagtcccagaccctcaaccaatcggagaacctcccgcagccccctcaggtgtgggatctcttacaatggcttcaggtggtggcgcaccagtggcagacaataacgaaggtgccgatggagtgggtagttcctcgggaaattggcattgcgattcccaatggctgggggacagagtcatcaccaccagcacccgaacctgggccctgcccacctacaacaatcacctctacaagcaaatctccaacagcacatctggaggatcttcaaatgacaacgcctacttcggctacagcaccccctgggggtattttgacttcaacagattccactgccacttctcaccacgtgactggcagcgactcatcaacaacaactggggattccggcctaagcgactcaacttcaggctcttcaacattcaggtcaaagaggttacggacaacaatggagtcaagaccatcgccaataaccttaccagcacggtccaggtcttcacggactcagactatcagctcccgtacgtgctcgggtcggctcacgagggctgcctcccgccgttcccagcggacgttttcatgattcctcagtacgggtatctgacgcttaatgatggaagccaggccgtgggtcgttcgtccttttactgcctggaatatttcccgtcgcaaatgctaagaacgggtaacaacttccagttcagctacgagtttgagaacgtacctttccatagcagctacgctcacagccaaagcctggaccgactaatgaatccactcatcgaccaatacttgtactatctctcaaagactattaacggttctggacagaatcaacaaacgctaaaattcagtgtggccggacccagcaacatggctgtccagggaagaaactacatacctggacccagctaccgacaacaacgtgtctcaaccactgtgactcaaaacaacaacagcgaatttgcttggcctggagcttcttcttgggctctcaatggacgtaatagcttgatgaatcctggacctgctatggccagccacaaagaaggagaggaccgtttctttcctttgtctggatctttaatttttggcaaacaaggaactggaagagacaacgtggatgcggacaaagtcatgataaccaacgaagaagaaattaaaactactaacccggtagcaacggagtcctatggacaagtggccacaaaccaccagagtgcccaagcacaggcgcagaccggctgggttcaaagccaaggaatacttccgggtatggtttggcaggacagagatgtgtacctgcaaggacccatttgggccaaaattcctcacacggacggcaactttcacccttctccgctgatgggagggtttggaatgaagcacccgcctccccagatcctcatcaaaaacacacctgtacctgcggatcctccaacggccttcaacaaggacaagctgaactctttcatcacccagtattctactggccaagtcagcgtggagatcgagtgggagctgcagaaggaaaacagcaagcgctggaacccggagatccagtacacttccaactattacaagtctaataatgttgaatttgctgttaatactgaaggtgtatatagtgaaccccgccccattggcaccagatacctgactcgtaatctg

SEQ ID NO: 617 - DNA, 2205 bp, Artificial Sequence
  source: /note="Description of Artificial Sequence: Synthetic polynucleotide"
atggctgccgatggttatcttccagattggctcgaggacaaccttagtgaaggaattcgcgagtggtgggctttgaaacctggagcccctcaacccaaggcaaatcaacaacatcaagacaacgcccgaggtcttgtgcttccgggttacaaataccttggacccggcaacggactcgacaagggggagccggtcaacgcagcagacgcggcggccctcgagcacgacaaggcctacgaccagcagctcaaggccggagacaacccgtacctcaagtacaaccacgccgacgccgagttccaggagcggctcaaagaagatacgtcttttgggggcaacctcgggcgagcagtcttccaggccaaaaagaggcttcttgaacctcttggtctggttgaggaagcggctaagacggctcctggaaagaagaggcctgtagagcagtctcctcaggaaccggactcctccgcgggtattggcaaatcgggtgcacagcccgctaaaaagagactcaatttcggtcagactggcgacacagagtcagtcccagaccctcaaccaatcggagaacctcccgcagccccctcaggtgtgggatctcttacaatggcttcaggtggtggcgcaccagtggcagacaataacgaaggtgccgatggagtgggtagttcctcgggaaattggcattgcgattcccaatggctgggggacagagtcatcaccaccagcacccgaacctgggccctgcccacctacaacaatcacctctacaagcaaatctccaacagcacatctggaggatcttcaaatgacaacgcctacttcggctacagcaccccctggaggtattttgacttcaacagattccactgccacttctcaccacgtgactggcagcgactcatcaacaactggggattccggcctaagcgactcaacttcaagctcttcaacattcaggtcaaagaggttacggacaacaatggagtcaagaccatcgccaataaccttaccagcacggtccaggccttcacggactcagactatcagctcccgtacgtgctcgggtcggctcacgagggctgcctcccgccgttcccagcggacgttttcatgattcctcagtacgggtatctgacgcttaatgatggaagccaggccgtgggtcgttcgtccttttactgcctggaatatttcccgtcgcaaatgctaagaacgggtaacaacttccagttcagctacgagtttgagaacgtacctttccatagcagctacgctcacagccaaagcctggaccgactaatgaatccactcatcgaccaatacttgtactatctctcaaagactattaacggttctggacagaatcaacaaacgctaaaattcagtgtggccggacccagcaacatggctgtccagggaagaaactacatacctggacccagctaccgacaacaacgtgtctcaaccactgtgactcaaaacaacaacagcgaatttgcttggcctggagcttcttcttgggctctcaatggacgtaatagcttgatgaatcctggacctgctatggccagccacaaagaaggagaggaccgtttctttcctttgtctggatctttaatttttggcaaacaaggaactggaagagacaacgtggatgcggacaaagtcatgataaccaacgaagaagaaattaaaactactaacccggtagcaacggagtcctatggacaagtggccacaaaccaccagagtgcccaagcacaggcgcagaccggctgggttcaaaaccaaggaatacttccgggtatggtttggcaggacagagatgtgtacctgcaaggacccatttgggccaaaattcctcacacggacggcaactttcacccttctccgctgatgggagggtttggaatgaagcacccgcctcctcagatcctcatcaaaaacacacctgtacctgcggatcctccaacggccttcaacaaggacgagctgaactctttcatcacccagtattctactggccaagtcagcgtggagatcgagtgggagctgcagaaggaaaacagcaagcgctggaacccggagatccagtacacttccaactattacaagtctaataatgttgaatttgctgttaatactgaaggtgtatatagtgaaccccgccccattggcaccagatacctgactcgtaatctg

SEQ ID NO: 618 - DNA, 2205 bp, Artificial Sequence
  source: /note="Description of Artificial Sequence: Synthetic polynucleotide"
atggctgccgatggttatcttccagattggctcgaggacaaccttagtgaaggaattcgcgagtggtgggctttgaaacctggagcccctcaacccaaggcaaatcaacaacatcaagacaacgctcgaggtcttgtgcttccgggttacaaataccttggacccggcaacggactcgacaagggggagccggtcaacgcagcagacgcggcggccctcgagcacgacaaggcctacgaccagcagctcaaggccggagacaacccgtacctcaagtacaaccacgccgacgccgagttccaggagcggctcaaagaagatacgtcttttgggggcaacctcgggcgagcagtcttccaggacaaaaagaggcttcttgaacctcttggtctggttgaggaagcggctaagacggctcctggaaagaagaggcctgtagagcagtctcctcaggaaccggactcctccgcgggtattggcaaatcgggtgcacagcccgctaaaaagagactcaatttcggtcagactggcgacacagagtcagtcccagaccctcaaccaatcggagaacctcccgcagccccctcaggtgtgggatctcttacaatggcttcaggtggtggcgcaccagtggcagacaataacgaaggtgccgatggagtgggtagttcctcgggaaattggcattgcgattcccaatggctgggggacagagtcatcaccaccagcacccgaacctgggccctgcccacctacaacaatcacctctacaagcaaatctccaacagcacatctggaggatcttcaaatgacaacgcctacttcggctacagcaccccctgggggtattttgacttcaacagattccactgccacttctcaccacgtgactggcagcgactcatcaacaactggggattccggcctaagcgactcaacttcaagctcttcaacattcaggtcaaagaggttacggacaacaatggagtcaagaccatcgccaataaccttaccagcacggtccaggtcttcacggactcagactatcagctcccgtacgtgctcgggtcggctcacgagggctgcctcccgccgttcccagcggacgttttcatgattcctcagtacgggtatctgacgcttaatgatggaagccaggccgtgggtcgttcgtccttttactgcctggaatatttcccgtcgcaaatgctaagaacgggtaacaacttccaattcagctacgagtttgagaacgtacctttccatagcagctacgctcacagccaaagcctggaccgactaatgaatccactcatcgaccaatacttgtactatctctcaaagactattaacggttctggacagaatcaacaaacgctaaaattcagtgtggccggacccagcaacatggctgtccagggaagaaactacatacctggacccagctaccgacaacaacgtgtctcaaccactgtgactcaaaacaacaacagcgaatttgcttggcctggagcttcttcttgggctctcaatggacgtaatagcttgatgaatcctggacctgctatggccagccacaaagaaggagaggaccgtttctttcctttgtctggatctttaatttttggcaaacaaggaactggaagagacaacgtggatgcggacaaagtcatgataaccaacgaagaagaaattaaaactactaacccggtagcaacggagtcctatggacaagtggccacaaaccaccagagtgcccaagcacaggcgcagaccggctgggttcaaaaccaaggaatacttccgggtatggtttggcaggacagagatgtgtacctgcaaggacccatttgggccaaaattcctcacacggacggcaactttcacccttctccgctgatgggagggtttggaatgaagcacccgcctcctcagatcctcatcaaaaacacacctgtacctgcggatcctccaacggccttcaacaaggacaagctgaactctttcatcacccagtattctactggccaagtcagcgtggagatcgagtgggagctgcagaaggaaaacagcaagcgctggaacccggagatccagtacacttccaactattacaagtctaataatgttgaatttgctgttaatactgaaggtgtatatagtgaaccccgccccattggcaccagatacctgactcgtaatctg

SEQ ID NO: 619 - DNA, 2208 bp, Artificial Sequence
  source: /note="Description of Artificial Sequence: Synthetic polynucleotide"
atggctgccgatggttatcttccagattggctcgaggacaaccttagtgaaggaattcgcgagtggtgggctttgaaacctggagcccctcaacccaaggcaaatcaacaacatcaagacaacgctcgaggtcttgtgcttccgggttacaaataccttggacccggcaacggactcgacaagggggagccggtcaacgcagcagacgcggcggccctcgagcacgacaaggcctacgaccagcagctcaaggccggagacaacccgtacctcaagtacaaccacgccgacgccgagttccaggagcggctcaaagaagatacgtcttttgggggcaacctcgggcgagcagtcttccaggccaaaaagaggcttcttgaacctcttggtctggttgaggaagcggctaagacggctcctggaaagaagaggcctgtagagcagtctcctcaggaaccggactcctccgcgggtattggcaaatcgggtgcacagcccgctaaaaagagactcaatttcggtcagactggcgacacagagtcagtcccagaccctcaaccaatcggagaacctcccgcagccccctcaggtgtgggatctcttacaatggcttcaggtggtggcgcaccagtggcagacaataacgaaggtgccgatggagtgggtagttcctcgggaaattggcattgcgattcccaatggctgggggacagagccatcaccaccagcacccgaacctgggccctgcccacctacaacaatcacctctacaagcaaatctccaacagcacatctggaggatcttcaaatgacaacgcctacttcggctacagcaccccctgggggtattttgacttcaacagattccactgccacttctcaccacgtgactggcagcggctcatcaacaacaactggggattccggcctaagcgactcaacttcaagctcttcaacattcaggtcaaagaggttacggacaacaatggagtcaagaccatcgccaataaccttaccagcacggtccaggtcttcacggactcagactatcagctcccgtacgtgctcgggtcggctcacgagggctgcctcccgccgttcccagcggacgttttcatgattcctcagtacgggtatctgacgcttaatgatggaagccaggccgtgggtcgttcgtccttttactgcctggaatatttcccgtcgcaaatgctaagaacgggtaacaacttccagttcagctacgagtttgagaacgtacctttccatagcagctacgctcacagccaaagcctggaccgactaatgaatccactcatcgaccaatacttgtactatctctcaaagactattaacggttctggacagaatcaacaaacgctaaaattcagtgtggccggacccagcaacatggctgtccagggaagaaactacatacctggacccagctaccgacaacaacgtgtctcaaccactgtgactcaaaacaacaacagcgaatttgcttggcctggagcttcttcttgggctctcaatggacgtaatagcttgatgaatcctggacctgctatggccagccacaaagaaggagaggaccgtttctttcctttgtctggatctttaatttttggcaaacaaggaactggaagagacaacgtggatgcggacaaagtcatgacaaccaacgaagaagaaattaaaactactaacccggtagcaacggagtcctatggacaagtggccacaaaccaccagagtgcccaagcacaggcgcagaccggctgggttcaaaaccaaggaatacttccgggtatggtttggcaggacagagatgtgtacctgcaaggacccatttgggccaaaattcctcacacggacggcaactttcacccttctccgctgatgggagggtttggaatgaagcacccgcctcctcagatcctcatcaaaaacacacctgtacctgcggatcctccaacggccttcaacaaggacaagctgaactctttcatcacccagtattctactggccaagtcagcgtggagatcgagtgggagctgcagaaggaaaacagcaagcgctggaacccggagatccagtacacttccaactattacaagtctaataatgttgaatttgctgttaatactgaaggtgtatatagtgaaccccgccccattggcaccagatacctgactcgtaatctg

SEQ ID NO: 620 - DNA, 2208 bp, Artificial Sequence
  source: /note="Description of Artificial Sequence: Synthetic polynucleotide"
atggctgccgatggttatcttccagattggctcgaggacaaccttagtgaaggaattcgcgagtggtgggctttgaaacctggagcccctcaacccaaggcaaatcaacaacatcaagacaacgctcgaggtcttgtgcttccgggttacaaataccttggacccggcaacggactcgacaagggggagccggtcaatgcagcagacgcggcggccctcgagcacgacaaggcctacgaccagcagctcaaggccggagacaacccgtacctcaagtacaaccacgccgacgccgagttccaggagcggctcaaagaagatacgtcttttgggggcaacctcgggcgagcagtcttccagaccaaaaagaggcttcttgaacctcttggtctggttgaggaagcggctaagacggctcctggaaagaagaggcctgtagagcagtctcctcaggaaccgggctcctccgcgggtattggcaaatcgggtgcacagcccgctaaaaagagactcaatttcggtcagactggcgacacagagtcagtcccagaccctcaaccaatcggagaacctcccgcagccccctcaggtgtgggatctcttacaatggcttcaggtggtggcgcaccagtggcagacaataacgaaggtgccgatggagtgggtagttcctcgggaaattggcattgcgattcccaatggctgggggacagagtcatcaccaccagcacccgaacctgggccctgcccacctacaacaatcacctctacaagcaaatctccaacagcacatctggaggatcttcaaatgacaacgcctacttcggctacagcaccccctgggggtattttgacttcaacagattccactgccacttctcaccacgtgactggcagcgactcatcaacaacaactggggattccggcctaagcgactcaacttcaagctcttcaacattcaggtcaaagaggttacggacaacaatggagtcaagaccatcgccaataaccttaccagcacggtccaggtcttcacggactcagactatcagctcccgtacgtgctcgggtcggctcacgagggctgcctcccgccgttcccagcggacgttttcatgattcctcagtacgggtatctgacgcttaatgatggaagccaggccgtgggtcgttcgtccttttactgcctggaatatttcccgtcgcaaatgctaagaacgggtaacaacttccagttcagctacgagtttgagaacgtacctttccatagcagctacgctcacagccaaagcctggaccgactaatgaatccactcatcgaccaatacttgcactatctctcaaagactattaacggttctggacagaatcaacaaacgctaaaattcagtgtggccggacccagcaacatggctgtccagggaagaaactacatacctggacccagctaccgacaacaacgtgtctcaaccactgtgactcaaaacaacaacagcgaatttgcttggcctggagcttcttcttgggctctcaatggacgtaatagcttgatgaatcctggacctgctatggccagccacaaagaaggagaggaccgtttctttcctttgtctggatctttaatttttggcaaacaaggaactggaagagacaacgtggatgcggacaaagtcatgataaccaacgaagaagaaattaaaactactaacccggtagcaacggagtcctatggacaagtggccacaaaccaccagagtgcccaagcacaggcgcagaccggctgggttcaaaaccaaggaatacttccgggtatggtttggcaggacagagatgtgtacctgcaaggacccatttgggccaaaattcctcacacggacggcaactttcacccttctccgctgatgggagggtttggaatgaagcacccgcctcctcagatcctcatcaaaaacacacctgtacctgcggatcctccaacggccttcaacaaggacaagctgaactctttcatcacccagtattctactggccaagtcagcgtggagatcgagtgggagctgcagaaggaaaacagcaagcgctggaacccggagatccagtacacttccaactattacaagtctaataatgttgaatttgctgttaatactgaaggtgtatatagtgaaccccgccccattggcaccagatacctgactcgtaatctg

SEQ ID NO: 621 - DNA, 2208 bp, Artificial Sequence
  source: /note="Description of Artificial Sequence: Synthetic polynucleotide"
atggctgccgatggttattttccagattggctcgaggacaaccttagtgaaggaattcgcgagtggtgggctttgaaacctggagcccctcaacccaaggcaaatcaacaacatcaagacaacgctcgaggtcttgtgcttccgggttacaaataccttggacccggcaacggactcgacaagggggagccggtcaacgcagcagacgcggcggccctcgagcacgacaaggcctacgaccagcagctcaaggccggagacaacccgtacctcaagtacaaccacgccgacgccgagttccaggagcggctcaaagaagatacgtcttttgggggcaacctcgggcgagcagtcttccaggccaaaaagaggcttcttgaacctcttggtctggttgaggaagcggctaagacggctcctggaaagaagaggcctgtagagcagtctcctcaggaaccggactcctccgcgggtattggcaaatcgggtgcacagcccgctaaaaagagactcaatttcggtcagactggcgacacagagtcagtcccagaccctcaaccaatcggagaatctcccgcagccccctcaggtgtgggatctcttacaatggcttcaggtggtggcgcaccagtggcagacaataacgaaggtgccgatggagtgggtagttcctcgggaaattggcattgcgattcccaatggctgggggacagagtcatcaccaccagcacccgaacctgggccctgcccacctacaacaatcacctctacaagcaaatctccaacagcacatctggaggatcttcaaatgacaacgcctacttcggctacagcaccccctgggggtattttgacttcaacagattccactgccacttctcaccacgtgactggcagcgactcatcaacaacaactggggattccggcctaagcgactcaacttcaagctcttcaacattcaggtcaaagaggttacggacaacaatggagtcaagaccatcgccaataaccttaccagcacggtccaggtcttcacggactcagactatcagctcccgtacgtgctcgggtcggctcacgagggctgcctcccgccgttcccagcggacgttttcatgattcctcagtacgggtatctgacgcttaatgatggaagccaggccgtgggtcgttcgtccttttactgcctggaatatctcccgtcgcaaatgctaagaacgggtaacaacttccagttcagctacgagtttgagaacgtacctttccatagcagctacgctcacagccaaagcctggaccgactaatgaatccactcatcgaccaatacttgcactatctctcaaagactattaacggttctggacagaatcaacaaacgctaaaattcagtgtggccggacccagcaacatggctgtccagggaagaaactacatacctggacccagctaccgacaacaacgtgtctcaaccactgtgactcaaaacaacaacagcgaatttgcttggcctggagcttcttcttgggctctcaatggacgtaatagcttgatgaatcctggacctgctgtggccagccacaaagaaggagaggaccgtttctttcctttgtctggatctttaatttttggcaaacaaggaactggaagagacaacgtggatgcggacaaagtcatgataaccaacgaagaagaaattaaaactactaacccggtagcaacggagtcctatggacaagtggccacaaaccaccagagtgcccaagcacaggcgcagaccggctgggttcaaaaccaaggaatacttccgggtatggtttggcaggacagagatgtgtacctgcaaggacccatttgggccaaaattcctcacacggacggcaactttcacccttctccgctgatgggagggtttggaatgaagcacccgcctcctcagatcctcatcaaaaacacacctgtacctgcggatcctccaacggccttcaacaaggacaagctgaactctttcatcacccagtattctactggccaagtcagcgtggagatcgagtgggagctgcagaaggaaaacagcaagcgctggaacccggagatccagtacacttccaactattacaagtctaataatgttgaatttgctgttaatactgaaggtgtatatagtgaaccccgccccattggcaccagatacctgactcgtaatctg

SEQ ID NO: 622 - DNA, 2208 bp, Artificial Sequence
  source: /note="Description of Artificial Sequence: Synthetic polynucleotide"
atggctgccgatggttatcttccagattggctcgaggacaaccttagtgaaggaattcgcgagtggtgggctttgaaacctggagcccctcaacccaaggcaaatcaacaacatcaagacaacgctcgaggtcttgtgcttccgggttacaaataccttggacccggcaacggactcgacaagggggagccggtcaacgcagcagacgcggcggccctcgagcacgacaaggcctacgaccagcagctcaaggccggagacaacccgtacctcaagtacaaccacgccgacgccgagttccaggagcggctcaaagaagatacgtcttttgggggcaacctcgggcgagcagtcttccaggccaaaaagaggcttcttgaacctcttggtccggttgaggaagcggctaagacggctcctggaaagaagaggcctgtagagcagtctcctcaggaaccggactcctccgcgggtattggcaaatcgggtgcacagcccgctaaaaagagactcaatttcggtcagactggcgacacagagtcagtcccagaccctcaaccaatcggagaacctcccgcagccccctcaggtgtgggatctcttacaatggcttcaggtggtggcgcaccagtggcagacaataacgaaggtgccgatggagtgggtagttcctcgggaaattggcattgcgattcccaatggctgggggacagagtcatcaccaccagcacccgaacctgggccctgcccacctacaacaatcacctctacaagcaaatctccaacagcacatctggaggatcttcaaatgacaacgcctacttcggctacagcaccccctgggggtattttgacttcaacagattccactgccacttctcaccacgtgactggcagcgactcatcaacaacaactggggattccggcctaagcgactcaacttcaagctcttcaacattcaggtcaaagaggttacggacaacaatggagtcaagaccatcgccaataaccttaccagcacggtccaggtcttcacggactcagactatcagctcccgtacgtgctcgggtcggctcacgagggctgcctcccgccgttcccagcggacgttttcatgattcctcagtacgggtatctgacgcttaatgatggaagccaggccgtgggtcgttcgtccttttactgcctggaatatttcccgtcgcaaatgctaagaacgggtaacaacttccagttcagctacgagtttgagaacgtacctttccatagcagctacgctcacagccaaagcctggaccgactaatgaatccactcatcgaccaatacttgtactatctctcaaagactattaacggttctggacagaatcaacaaacgctaaaattcagtgtggccggacccagcaacatggctgtccagggaagaaactacatacctggacccagctaccgacaacaacgtgtctcaaccactgtgactcaaaacaacaacagcgaatttgcttggcctggagcttcttcttgggctctcaatggacgtaatagcttgatgaatcctggacctgctatggccagccacaaagaaggagaggaccgtttctttcctttgtctggatctttaatttttggcaaacaaggaactggaagagacaacgtggatgcggacaaagtcatgataaccaacgaagaagaaattaaaactactaacccggtagcaacggagtcctatggacaagcggccacaaaccaccagagtgcccaagcacaggcgcagaccggctgggttcaaaaccaaggaatacttccgggtatggtttggcaggacagagatgtgtacctgcaaggacccatttgggccaaaattcctcacacggacggcaactttcacccttctccgctgatgggagggtttggaatgaagcacccgcctcctcagatcctcatcaaaaacacacctgtacctgcggatcctccaacggccttcaacaaggacaagctgaactctttcatcacccagtattctactggccaagtcagcgtggagatcgagtgggagctgcagaaggaaaacagcaagcgctggaacccggagatccagtacacttccaactattacaagtctaataatgttgaatttgctgttaatactgaaggtgtatatagtgaaccccgccccattggcaccagatacctgactcgtaatctg

SEQ ID NO: 623 - DNA, 2208 bp, Artificial Sequence
  source: /note="Description of Artificial Sequence: Synthetic polynucleotide"
atggctgccgatggttatcttccagattggctcgaggacaaccttagtgaaggaattcgcgagtggtgggctttgaaacctggagcccctcaacccaaggcaaatcaacaacatcaagacaacgctcggggtcttgtgcttccgggttacaaataccttggacccggcaacggactcgacaagggggagccggtcaacgcagcagacgcggcggccctcgagcacgacaaggcctacgaccagcagctcaaggccggagacaacccgtacctcaagtacaaccacgccgacgccgagttccaggagcggctcaaagaagatacgtcttttgggggcaacctcgggcgagcagtcttccaggccaaaaagaggcttcttgaacctcttggtccggttgaggaagcggctaagacggctcctggaaagaagaggcctgtagagcagtctcctcaggaaccggactcctccgcgggtattggcaaatcgggtgcacagcccgctaaaaagagactcaatttcggtcagactggcgacacagagtcagtcccagaccctcaaccaatcggagaacctcccgcagccccctcaggtgtgggatctcttacaatggcttcaggtggtggcgcaccagtggcagacaataacgaaggtgccgatggagtgggtagttcctcgggaaattggcattgcgattcccaatggctgggggacagagtcatcaccaccagcacccgaacctgggccctgcccacctacaacaatcacctctacaagcaaatctccaacagcacatctggaggatcttcaaatgacaacgcctacttcggctacagcaccccctgggggtattttgacttcaacagattccactgccacttctcaccacgtgactggcggcgactcatcaacaacaactggggattccggcctaagcgactcaacttcaagctcttcaacattcaggtcaaagaggttacggacaacaatggagtcaagaccatcgccaataaccttaccagcacggtccaggtcttcacggactcagactatcagctcccgtacgtgctcgggtcggctcacgagggctgcctcccgccgttcccagcggacgttttcatgattcctcagtacgggtatctgacgcttaatgatggaagccaggccgtgggtcgttcgtccttttactgcctggaatatttcccgtcgcaaatgctaagaacgggtaacaacttccagttcagctacgagtttgagaacgtacctttccatagcagctacgctcacagccaaagcctggaccgactaatgaatccactcatcgaccaatacttgtactatctctcaaagactattaacggttctggacagaatcaacaaacgctaaaattcagtgtggccggacccagcaacatggctgtccagggaagaaactacatacctggacccagctaccgacaacaacgtgtctcaaccactgtgactcaaaacaacaacagcgaatttgcttggcctggagcttcttcttgggctctcaatggacgtaatagcttgatgaatcctggacctgctatggccagccacaaagaaggagaggaccgtttctttcctttgtctggatctttaatttttggcaaacaaggaactggaagagacaacgtggatgcggacaaagtcatgataaccaacgaagaagaaattaaaactactaacccggtagcaacggagtcctatggacaagtggccacaaaccaccagagtgcccaagcacaggcgcagaccggctgggttcaaaaccaaggaatacttccgggtatggtttggcaggacagagatgtgtacctgcaaggacccatttgggccaaaattcctcacacggacggcaactttcacccttctccgctgatgggagggtttggaatgaagcacccgcctcctcagatcctcatcaaaaacacacctgtacctgcggatcctccaacggccttcaacaaggacaagctgaactctttcatcacccagtattctactggccaagtcagcgtggagatcgagtgggagctgcagaaggaaaacagcaagcgctggaacccggagatccagtacacttccaactattacaagtctaataatgttgaatttgctgttaatactgaaggtgtatatagtgaaccccgccccattggcaccagatacctgactcgtaatctg

SEQ ID NO: 624 - DNA, 2208 bp, Artificial Sequence
  source: /note="Description of Artificial Sequence: Synthetic polynucleotide"
atggctgccgatggttatcttccagattggctcgaggacaaccttagtgaaggaattcgcgagtggtgggctttgaaacctggagcccctcaacccaaggcaaatcaacaacatcaagacaacgctcgaggtcttgtgcttccgggttacaaataccttggacccggcaacggactcgacaagggggagccggtcaacgcagcagacgcggcggccctcgagcacgacaaggcctacgaccagcagctcaaggccggagacaacctgtacctcaagtacaaccacgccgacgccgagttccaggagcggctcaaagaagatacgtcttttgggggcaacctcgggcgagcagtcttccaggccaaaaagaggcttcttgaacctcttggtctggttgaggaagcggctaagacggctcctggaaagaagaggcctgtagagcagtctcctcaggaaccggactcctccgcgggtattggcaaatcgggtgcacagcccgctaaaaagagactcaatttcggtcagactggcgacacagagtcagtcccagaccctcaaccaatcggagaacctcccgcagccccctcaggtgtgggatctcttacaatggcttcaggtggtggcgcaccagtggcagacaataacgaaggtgccgatggagtgggtagttcctcgggaaattggcattgcgattcccaatggctgggggacagagtcatcaccaccagcacccgaacctgggccctgcccacctacaacaatcacctctacaagcaaatctccaacagcacatctggaggatcttcaaatgacaacgcctacttcggctacagcaccccctgggggtattttgacttcaacagattccactgccacttctcaccacgtgactggcagcgactcatcaacaacaactggggattccggcctaagcgactcaacttcaagctcttcaacattcaggtcaaagaggttacggacaacaatggagtcaagaccatcgccaataaccttaccagcacggtccaggtcttcacggactcagactatcagctcccgtacgtgctcgggtcggctcacgagggctgcctcccgccgttcccagcggacgttttcatgattcctcagtacgggtatctgacgcttaatgatggaagccaggccgtgggtcgttcgtccttttactgcctggaatatttcccgtcgcaaatgctaagaacgggtaacaacttccagttcagctacgagtttgagaacgtacctttccatagcagctacgctcacagccaaagcctggaccgactaatgaatccactcatcgaccaatacttgcactatctctcaaagactattaacggttctggacagaatcaacaaacgctaaaattcagtgtggccggacccagcaacatggctgtccagggaagaaactacatacctggacccagctaccgacaacaacgtgtctcaaccactgtgactcaaaacaacaacagcgaatttgcttggcctggagcttcttcttgggctctcaatggacgtaatagcttgatgaatcctggacctgctatggccagccacaaagaaggagaggaccgtttctttcctttgtctggatctttaatttttggcaaacaaggaactggaagagacaacgtggatgcggacaaagtcatgataaccaacgaagaagaaattaaaactactaacccggtagcaacggagtcctatggacaagtggccacaaaccaccagagtgcccaagcacaggcgcagaccggctgggttcaaaaccaaggaatacttccgggtatggtttggcaggacagagatgtgtacctgcaaggacccatttgggccaaaattcctcacacggacggcaactttcacccttctccgctgatgggagggtttggaatgaagcacccgcctcctcagatcctcatcaaaaacacacctgtacctgcggatcctccaacggccttcaacaaggacaagctgaactctttcatcacccagtattctactggccaagtcagcgtggagatcgagtgggagctgcagaaggaaaacagcaagcgctggaacccggagatccagtacacttccaactattacaagtctaataatgttgaatttgctgttaatactgaaggtgtatatagtgaaccccgccccattggcaccagatacctgactcgtaatctg

SEQ ID NO: 625 - DNA, 2208 bp, Artificial Sequence
  source: /note="Description of Artificial Sequence: Synthetic polynucleotide"
atggctgccgatggttatcttccagattggctcgaggacaaccttagtgaaggaattcgcgagtggtgggctttgaaacctggagcccctcaacccaaggcaaatcaacaacatcaagacaacgctcgaggtcttgtgcttccgggttacaaataccttggacccggcaacggactcgacaagggggagccggtcaacgcagcagacgcggcggccctcgagcacgacaaggcctacgaccagcagctcaaggccggagacaacccgtacctcaagtacaaccacgccgacgccgagttccaggagcggctcaaagaagatacgtcttttgggggcaacctcgggcgagcagtcttccaggccaaaaagaggcttcttgaacctcttggtctggttgaggaagcggctaagacggctcctggaaagaagaggcctgtagagcagtctcctcaagaaccggactcctccgcgggtattggcaaatcgggtgcacagcccgctaaaaagagactcaatttcggtcagactggcgacacagagtcagtcccagaccctcaaccaatcggagaacctcccgcagccccctcaggtgtgggatctcttacaatggcttcaggtggtggcgcaccagtggcagacaataacgaaggtgccgatggagtgggtagttcctcgggaaattggcattgcgattcccaatggctgggggacagagtcatcaccaccagcacccgaacctgggccctgcccacctacaacaatcacctctacaagcaaatctccaacagcacatctggaggatcttcaaatgacaacgcctacttcggctacagcaccccctgggggtattttgacttcaacagattccactgccacttctcaccacgtgactggcagcgactcatcaacaacaactggggattccggcctaagcgactcaacttcaagctcttcaacattcaggtcaaagaggttacggacaacaatggagtcaagaccatcgccaataaccttaccagcacggtccaggtcttcacggactcagactatcagctcccgtacgtgctcgggtcggctcacgagggctgcctcccgccgttcccagcggacgttttcatgattcctcagtacgggtatctgacgcttaatgatggaagccaggccgtgggtcgttcgtccttttactgcctggaatatttcccgtcgcaaatgctaagaacgggtaacaacttccagttcagctacgagtttgagaacgtacctttccatagcagctacgctcacagccaaagcctggaccgactaatgaatccactcatcgaccaatacttgcactatctctcaaagactattaacggttctggacagaatcaacaaacgctaaaattcagtgtggccggacccagcaacatggctgtccagggaagaaactacatacctggacccagctaccgacaacaacgtgtctcaaccactgtgactcaaaacaacaacagcgaatttgcttggcctggagcttcttcttgggctctcaatggacgtaatagcttgatgaatcctggacctgctatggccagccacaaagaaggagaggaccgtttctttcctttgtctggatctttaatttttggcaaacaaggaactggaagagacaacgtggatgcggacaaagtcatgataaccaacgaagaagaaattaaaactactaacccggtagcaacggagtcctatggacaagtggccacaaaccaccagagtgcccaagcacaggcgcagaccggctgggttcaaaaccaaggaatacttccgggtatggtttggcaggacagagatgtgtacctgcaaggacccatttgggccaaaattcctcacacggacggcaactttcacccttctccgctgatgggagggtttggaatgaagcacccgcctcctcagatcctcatcaaaaacacacctgtacctgcggatcctccaacggccttcaacaaggacaagctgaactctttcatcacccagtattctactggccaagtcagcgtggagatcgagtgggagctgcagaaggaaaacagcaagcgctggaacccggagatccagtacacttccaactattacaagtctaataatgttgaatttgctgttaatactgaaggtgtatatagtgaaccccgccccattggcaccagatacctgactcgtaatctg

SEQ ID NO: 626 - DNA, 2208 bp, Artificial Sequence
  source: /note="Description of Artificial Sequence: Synthetic polynucleotide"
  modified_base (1325)..(1325): a, c, g, or t
atggctgccgatggttatcttccagattggctcgaggacaaccttagtgaaggaattcgcgagtggtgggctttgaaacctggagcccctcaacccaaggcaaatcaacaacatcaagacaacgctcgaggtcttgtgcttccgggttacaaataccttggacccggcaacggactcgacaagggggagccggtcaacgcagcagacgcggcggccctcgagcacgacaaggcctacgaccagcagctcaaggccggagacaacccgtacctcaagtacaaccacgccgacgccgagttccaggagcggctcaaagaagatacgtcttttgggggcaacctcgggcgagcagtcttccaggccaaaaagaggcttcttgaacctcttggtctggttgaggaagcggctaagacggctcctggaaagaagaggcctgtagagcagtctcctcaggaaccggactcctccgcgggtattggcaaatcgggtgcacagcccgctaaaaagagactcaatttcggtcagactggcgacacagagtcagtcccagaccctcaaccaatcggagaacctcccgcagccccctcaggtgtgggatctcttacaatggcttcaggtggtggcgcaccagtggcagacaataacgaaggtgccgatggagtgggtagttcctcgggaaattggcattgcgattcccaatggctgggggacagagtcatcaccaccagcacccgaacctgggccctgcccacctacaacaatcacctctacaagcaaatctccaccagcacatctggaggatcttcaaatgacaacgcctacttcggctacagcaccccctgggggtattttgacttcaacagattccactgccacttctcaccacgtgactggcagcgactcatcaacaacaactggggattccggcctaagcgactcaacttcaagctcttcaacattcaggtcaaagaggttacggacaacaatggagtcaagaccatcgccaataaccttaccagcacggtccaggtcttcacggactcagactatcagctcccgtacgtgctcgggtcggctcacgagggctgcctcccgccgttcccagcggacgttttcatgattcctcagtacgggtatctgacgcttaatgatggaagccaggccgtgggtcgttcgtccttttactgcctggaatatttcccgtcgcaaatgctaagaacgggtaacaacttccagttcagctacgagtttgagaacgtacctttccatagcagctacgctcacagccaaagcctggaccgactaatgaatccactcatcgaccnatacttgcactatctctcaaagactattaacggttctggacagaatcaacaaacgctaaaattcagtgtggccggacccagcaacatggctgtccagggaagaaactacatacctggacccagctaccgacaacaacgtgtctcaaccactgtgactcaaaacaacaacagcgaatttgcttggcctggagcttcttcttgggctctcaatggacgtaatagcttgatgaatcctggacctgctatggccagccacaaagaaggagaggaccgtttctttcctttgtctggatctttaatttttggcaaacaaggaactggaagagacaacgtggatgcggacaaagtcatgataaccaacgaagaagaaattaaaactactaacccggtagcaacggagtcctatggacaagtggccacaaaccaccagagtgcccaagcacaggcgcagaccggctgggttcaaaaccaaggaatacttccggatatggtttggcaggacagagatgtgtacctgcaaggacccatttgggccaaaattcctcacacggacggcaactttcacccttctccgctgatgggagggtttggaatgaagcacccgcctcctcagatcctcatcaaaaacacacctgtacctgcggatcctccaacggccttcaacaaggacaagctgaactctttcatcacccagtattctactggccaagtcagcgtggagatcgagtgggagctgcagaaggaaaacagcaagcgctggaacccggagatccagtacacttccaactattacaagtctaataatgttgaatttgctgttaatactgaaggtgtatatagtgaaccccgccccattggcaccagatacctgactcgtaatctg

SEQ ID NO: 627 - DNA, 2208 bp, Artificial Sequence
  source: /note="Description of Artificial Sequence: Synthetic polynucleotide"
atggctgccgatggttatcttccagattggctcgaggacaaccttagtgaaggaattcgcgagtggtgggctttgaaacctggagcccctcaacccaaggcaaatcaacaacatcaagacaacgctcgaggtcttgtgcttccgggttacaaataccttggacccggcaacggactcgacaagggggagccggtcaacgcagcagacgcggcggccctcgagcacgacaaggcctacgaccagcagctcaaggccggagacaacccgtacctcaagtacaaccacgccgacgccgagttccaggagcggctcaaagaagatacgtcttttgggggcaacctcgggcgagcagtcttccaggccaaaaagaggcttcttgaacctcttggtctggttgaggaagcggctaagacggctcctggaaagaagaggcctgtagagcagtctcctcaggaaccggactcctccgcgggtattggcaaatcgggtgcacagcccgctaaaaagagactcaatttcggtcagactggcgacacagagtcagtcccagaccctcaaccaatcggagaacctcccgcagccccctcaggtgtgggatctcttacaatggcttcaggtggtggcgcaccagtggcagacaataacgaaggtgccgatggagtgggtagttcctcgggaaattggcattgcgattcccaatggctgggggacagagtcatcaccaccagcacccgaacctgggccctgcccacctacaacaatcacctctacaagcaaatctccaacagcacatctggaggatcttcaaatgacaacgcctacttcggctacagcaccccctgggggtattttgacttcaacagattccactgccacttctcaccacgtgactggcagcgactcatcaacaacaactggggattccggcctaagcgactcaacttcaagctcttcaacattcaggtcaaagaggttacggacaacaatggagtcaagaccatcgccaataaccttaccagcacggtccaggtcttcacggactcagactatcagctcccgtacgtgctcgggtcggctcacgagggctgcctcccgccgttcccagcggacgttttcatgattcctcagtacgggtatctgacgcttaatgatggaagccaggccgtgggtcgttcgtccttttactgcctggaatatttcccgtcgcaaatgctaagaacgggtaacaacttccagttcagctacgagtttgagaacgtacctttccatagcagctacgctcacagccaaagcctggaccgactaatgaatccactcatcgaccaatacttgcactatctctcaaagactattaacggttctggacagaatcaacaaacgctaaaattcagtgtggccggacccagcaacatggctgtccagggaagaaactacatacctggacccagctaccgacaacaacgtgtctcaaccactgtgactcaaaacaacaacagcgaatttgcttggcctggagcttcttcttgggctctcaatggacgtaatagcttgatgaatcctggacctgctatggccagctacaaagaaggagaggacagtttctttcctttgtctggatctttaatttttggcaaacaaggaactggaagagacaacgtggatgcggacaaagtcatgataaccaacgaagaagaaattaaaactactaacccggtagcaacggagtcctatggacaagtggccacaaaccaccagagtgcccaagcacaggcgcagaccggctgggttcaaaaccaaggaatacttccgggtatggtttggcaggacagagatgtgtacctgcaaggacccatttgggccaaaattcctcacacggacggcaactttcacccttctccgctgatgggagggtttggaatgaagcacccgcctcctcagaccctcatcaaaaacacacctgtacctgcggatcctccaacggccttcaacaaggacaagctgaactctttcatcacccagtattctactggccaagtcagcgtggagatcgagtgggagctgcagaaggaaaacagcaagcgctggaacccggagatccagtacacttccaactattacaagtctaataatgttgaatttgctgttaatactgaaggtgtatatagtgaaccccgccccattggcaccagatacctgactcgtaatctg

SEQ ID NO: 628 - DNA, 2208 bp, Artificial Sequence; identical to SEQ ID NO: 611
  source: /note="Description of Artificial Sequence: Synthetic polynucleotide"

SEQ ID NO: 629 - DNA, 2208 bp, Artificial Sequence
  source: /note="Description of Artificial Sequence: Synthetic polynucleotide"
atggctgccgatggttatcttccagattggctcgaggacaaccttagtgaaggaattcgcgagtggtgggctttgaaacctggagcccctcaacccagggcaaatcaacaacatcaagacaacgctcgaggtcttgtgcttccgggttacaaataccttggacccggcaacggactcgacaagggggagccggtcaacgcagccgacgcggcggccctcgagcacgacaaggcctacgaccagcagctcaaggccggagacaacccgtacctcaagtacaaccacgccgacgccgagttccaggagcggctcaaagaagatacgtcttttgggggcaacctcgggcgagcagtcttccaggccaaaaagaggcttcttgaacctcttggtctggttgaggaagcggctaagacggctcctggaaagaagaggcctgtagagcagtctcctcaggaaccggactcctccgcgggtattggcaaatcgggtgcacagcccgctaaaaagagactcaatttcggtcagactggcgacacagagtcagtcccagaccctcaaccaatcggagaacctcccgcagccccctcaggtgtgggatctcttacaatggcttcaggtggtggcgcaccagtggcagacaataacgaaggtgccgatggagtgggtagttcctcgggaaattggcattgcgattcccaatggctgggggacagagtcatcaccaccagcacccgaacctgggccctgcccacctacaacaatcacctctacaagcaaatctccaacagcacatctggaggatcttcaaatgacaacgcctacttcggctacagcaccccctgggggtattttgacttcaacagattccactgccacttctcaccacgtgactggcagcgactcatcaacaacaactggggattccggcctaagcgactcaacttcaagctcttcaacattcaggtcaaagaggttacggacaacaatggagtcaagaccatcgccaataaccttaccagcacggtccaggtcttcacggactcagactgtcagctcccgtacgtgctcgggtcggctcacgagggctgcctcccgccgttcccagcggacgttttcatgattcctcagtacgggtatctgacgcttaatgatggaagccaggccgtgggtcgttcgtccttttactgcctggaatatttcccgtcgcaaatgctaagaacgggtaacaacttccagttcagctacgagtttgagaacgtacctttccatagcagctacgctcacagccaaagcctggaccgactaacgaatccactcatcgaccaatacttgtactatctctcaaagactattaacggttctggacagaatcaacaaacgctaaaattcagtgtggccggacccagcaacatggctgtccagggaagaaactacatacctggacccagctaccgacaacaacgtgtctcaaccactgtgactcaaaacaacaacagcgaatttgcttggcctggagcttcttcttgggctctcaatggacgtaatagcttgatgaatcctggacctgctatggccagccacaaagaaggagaggaccgtttctttcctttgtctggatctttaatttttggcaaacaaggaactggaagagacaacgtggatgcggacaaagtcatgataaccaacgaagaagaaattaaaactactaacccggtagcaacggagtcccatggacaagtggccacaaaccaccagagtgcccaagcacaggcgcagaccggctgggttcaaaaccaaggaatacttccgggtatggtttggcaggacagagatgtgtacctgcaaggacccatttgggccaaaattcctcacacggacggcaactttcacccttctccgctgatgggagggtttggaatgaagcacccgcctcctcagatcctcatcaaaaacacacctgtacctgcggatcctccaacggccttcaacaaggacaagctgaactctttcatcacccagtattctactggccaagtcagcgtggagatcgagtgggagctgcagaaggaaaacagcaagcgctggaacccggagatccagtacacttccaactattacaagtctaataatgttgaatttgctgttaatactgaaggtgtatatagtgaaccccgccccattggcaccagatacctgactcgtaatctg

SEQ ID NO: 630 - DNA, 2208 bp, Artificial Sequence
  source: /note="Description of Artificial Sequence: Synthetic polynucleotide"
atggctgccgatggttatcttccagattggctcgaggacaaccttagtgaaggaattcgcgagtggtgggctttgaaacctggagcccctcaacccaaggcaaatcaacaacatcaagacaacgctcgaggtcttgtgcttccgggttacaaataccttggacccggcaacggactcgacaagggggagccggtcaacgcagcagacgcggcggccctcgagcacgacaaggcctacgaccagcagctcaaggccggagacaacccgtacctcaagtacaaccacgccgacgccgagttccaggagcggctcaaagaagatacgtcttttgggggcaacctcgggcgagcagtcttccaggccaaaaagaggcttcttgaacctcttggtctggttgaggaagcggctaagacggctcctggaaagaagaggcctgtagagcagtctcctcaggaaccggactcctccgcgggtattggcaaatcgggtgcacagcccgctaagaagagactcaatttcggtcagactggcgacacagagtcagtcccagaccctcaaccaatcggagaacctcccgcagccccctcaggtgtgggatctcttacaatggcttcaggtggtggcgcaccagtggcagacaataacgaaggtgccgatggagtgggtagttcctcgggaaattggcattgcgattcccaatggctgggggacagagtcatcaccaccagcacccgaacctgggccctgcccacctacaacaatcacctctacaagcaaatctccaacagcacatctggaggatcttcaaatgacaacgcctacttcggctacagcaccccctgggggtattttgacttcaacagattccactgccacttctcaccacgtgactggcagcgactcatcaacaacaactggggattccggcctaagcgactcaacttcaagctcttcaacattcaggtcaaagaggttacggacaacaatggagtcaagaccatcgccaataaccttaccagcacggtccaggtcttcacggactcagactatcagctcccgtacgtgctcgggtcggctcacgagggctgcctcccgccgttcccagcggacgttttcatgattcctcagtacgggtatctgacgcttaatgatggaagccaggccgtgggtcgttcgtccttttactgcctggaatatttcccgtcgcaaatgctaagaacgggtaacaacttccagttcagctacgagtttgagaacgtacctttccatagcagctacgctcacagccaaagcctggaccgactaatgaatccacccatcgaccaatacttgtactatctctcaaagactattaacggttctggacagaatcaacaaacgctaaaattcagtgtggccggacccagcaacatggctgtccagggaagaaactacatacctggacccagctaccgacaacaacgtgtctcaaccactgtgactcaaaacaacaacagcgaatttgcttggcctggagcttcttcttgggctctcaatggacgtaatagcttgatgaatcctggacctgctatggccagccacaaagaaggagaggaccgtttctttcctttgtctggatctttaatttttggcaaacaaggaactggaagagacaacgtggatgcggacaaagtcatgataaccaacgaagaagaaattaaaactactaacccggtagcaacggagtcctatggacaagtggccacaaaccaccagagtgcccaagcacaggcgcagaccggctgggttcaaaaccaaggaatacttccgggtatggtttggcaggacagagatgtgtacctgcaaggacccatttgggccaaaattcctcacacggacggcaactttcacccttctccgctgatgggagggtttggaatgaagcacccgcctcctcagatcctcatcaaaaacacacctgtacctgcggatcctccaacggccttcaacaaggacaagctgaactctttcatcacccagtattctactggccaagtcagcgtggagatcgagtgggagctgcagaaggaaaacagcaagcgctggaacccggagatccagtacacttccaactattacaagtctaataatgttgaatttgctgttaatactgaaggtgtatatggtgaaccccgccccattggcaccagatacctgactcgtaatctg

SEQ ID NO: 631 - DNA, 2208 bp, Artificial Sequence
  source: /note="Description of Artificial Sequence: Synthetic polynucleotide"
atggctgccgatggttatcttccagattggctcgaggacaaccttagtgaaggaattcgcgagtggtgggctttgaaacctggagcccctcaacccaaggcaaatcaacaacatcaagacaacgctcgaggtcttgtgcttccgggttacaaataccttggacccggcaacggactcgacaagggggagccggtcaacgcagcagacgcggcggccctcgagcacgacaaggcctacgaccagcagctcaaggccggagacaacccgtacctcaagtacaaccacgccgacgccgagttccaggagcggctcaaagaagatacgtcttttgggggcaacctcgggcgagcagtcttccaggccaaaaagaggcttcttgaacctcttggtctggttgaggaagcggctaagacggctcctggaaagaagaggcctgtagagcagtctcctcaggaaccggactcctccgcgggtattggcaaatcgggtgcacagcccgctaaaaagagactcaatttcggtcagactggcgacacagagtcagtcccagaccctcaaccaatcggagaacctcccgcagccccctcaggtgtgggatctcttacaatggcttcaggtggtggcgcaccagtggcagacaataacgaaggtgccgatggagtgggtagttcctcgggaaattggcattgcgattcccaatggctgggggacagagtcatcaccaccagcacccgaacctgggccctgcccacctacaacaatcacctctacaagcaaatctccaacagcacatctggaggatcttcaaatgacaacgcctacttcggctacagcaccccctgggggtattttgacttcaacagattccactgccacttctcaccacgtgaccggcagcgactcatcaacaacaactggggattccggcctaagcgactcaacttcaagctcttcaacattcaggtcaaagaggttacggacaacaatggagtcaagaccatcgccaataaccttaccagcacggtccaggtcttcacggactcagactatcagctcccgtacgtgctcgggtcggctcacgagggctgcctcccgccgttcccagcggacgttttcatgattcctcagtacgggtatctgacgcttaatgatggaagccaggccgtgggtcgttcgtccttttactgcctggaatatttcccgtcgcaaatgctaagaacgggtaacaacttccagttcagctacgagtttgagaacgtacctttccatagcagctacgctcacagccaaagcctggaccgactaatgaatccactcatcgaccaatacttgtactatctctcaaagactattaacggttctggacagaatcaacaaacgctaaaattcagtgtggccggacccagcaacatggctgtccagggaagaaactacatacctggacccagctaccgacaacaacgtgtctcaaccactgtgactcaaaacaacaacagcgaatttgcttggcctggagcttcttcttgggctctcaatggacgtaatagcttgatgaatcctggacctgctatggccagccacaaagaaggagaggaccgtttctttcctttgtctggatctttaatttttggcaaacaaggaactggaagagacaacgtggatgcggacaaagtcatgataaccaacgaagaagaaattaaaactactaacccggtagcaacggagtcctatggacaagtggccacaaaccaccagagtgcccaagcacaggcgcagaccggctgggttcaaaaccaaggaatacttccgggtatggtttggcaggacagagatgtgtacctgcaaggacccatttgggccaaaattcctcacacggacggcaactttcacccttctccgctgatgggagggtttggaatgaagcacccgcctcctcagatcctcatcaaaaacacacctgtacctgcggatcctccaacggccttcaacaaggacaagctgaactctttcatcacccagtattctactggccaagtcagcgtggagatcgagtgggagctgcagaaggaaaacagcaagcgctggaacccggagatccagtacacttccaactattacaagtctaataatgttgaatttgctgttaatactgaaggtgtatatagtgaaccccgccccattggcaccagatacctgactcgtaatctg

SEQ ID NO: 632 - DNA, 2208 bp, Artificial Sequence
  source: /note="Description of Artificial Sequence: Synthetic polynucleotide"
atggctgccgatggttatcttccagattggctcgaggacaaccttagtgaaggaattcgcgagtggtgggctttgaaacctggagcccctcaacccaaggcaaatcaacaacatcaagacaacgctcgaggtcttgtgcttccgggttacaaataccttggacccggcaacggactcgacaagggggagccggtcaacgcagcagacgcggcagccctcgagcacgacaaggcctacgaccagcagctcaaggccggagacaacccgtacctcaagtacaaccacgccgacgccgagttccaggagcggctcaaagaagatacgtcttttgggggcaacctcgggcgagcagtcttccaggccaaaaagaggcttcttgaacctcttggtctggttgaggaagcggctaagacggctcctggaaagaagaggcctgtagagcagtctcctcaggaaccggactcctccgcgggtattggcaaatcgggtgcacagcccgctaaaaagagactcaatttcggtcagactggcgacacagagtcagtcccagaccctcaaccaatcggagaacctcccgcagccccctcaggtgtgggatctcttacaatggcttcaggtggtggcgcaccagtggcagacaataacgaaggtgccgatggagtgggtagttcctcgggaaattggcattgcaattcccaatggctgggggacagagtcatcaccaccagcacccgaacctgggccctgcccacctacaacaatcacctctacaagcaaatctccaacagcacatctggaggatcttcaaatgacaacgcctacttcggctacagcaccccctgggggtattttgacttcaacagattccactgccacttctcaccacgtgactggcagcgactcatcaacaacaactggggattccggcctaagcgactcaacttcaagctcttcaacattcaggtcaaagaggttacggacaacaatggagtcaagaccatcgccaataaccttaccagcacggtccaggtcttcacggactcagactatcagctcccgtacgtgctcgggtcggctcacgagggctgcctcccgccgttcccagcggacgttttcatgattcctcagtacgggtatctgacgcttaatgatggaagccaggccgtgggtcgttcgtccttttactgcctggaatatttcccgtcgcaaatgctaagaacgggtaacaacttccagttcagctacgagtttgagaacgtacctttccatagcagctacgctcacagccaaagcctggaccgactaatgaatccactcatcgaccaatacttgtactatctctcaaagactattaacggttctggacagaatcaacaaacgctaaaattcagtgtggccggacccggcaacatggctgtccagggaagaaactacatacctggacccagctaccgacaacaacgtgtctcaaccactgtgactcaaaacaacaacagcgaatttgcttggcctggagcttcttcttgggctctcaatggacgtaatagcttgatgaatcctggacctgctatggccagccacaaagaaggagaggaccgtttctttcctttgtctggatctttaatttttggcaaacaaggaactggaagagacaacgtggatgcggacaaagtcatgataaccaacgaagaagaaattaaaactactaacccggtagcaacggagtcctatggacaagtggccacaaaccaccagagtgcccaagcacaggcgcagaccggctgggttcaaaaccaaggaatacttccgggtatggtttggcaggacagagatgtgtacctgcaaggacccatttgggccaaaattcctcacacggacggcaactttcacccttctccgctgatgggagggtttggaatgaagcacccgcctcctcagatcctcatcaagaacacacctgtacctgcggatcctccaacggccttcaacaaggacaagctgaactctttcatcacccagtattctactggccaagtcagcgtggagatcgagtgggagctgcagaaggaaaacagcaagcgctggaacccggagatccagtacacttccaactattacaagtctaataatgttgaatttgctgttaatactgaaggtgtatatagtgaaccccgccccattggcaccagatacctgactcgtaatctg

SEQ ID NO: 633 - DNA, 2208 bp, Artificial Sequence
  source: /note="Description of Artificial Sequence: Synthetic polynucleotide"
atggctgccgatggttatcttccagattggctcgaggacaaccttagtgaaggaattcgcgagtggtgggctttgaaacctggagcccctcaacccaaggcaaatcaacaacatcaagacaacgctcgaggtcttgtgcttccgggttacagataccttggacccggcaacggactcgacaagggggagccggtcaacgcagcagacgcggcggccctcgagcacgacaaggcctacgaccagcagctcaaggccggagacaacccgtacctcaagtacaaccacgccgacgccgagttccaggagcggctcaaagaagatacgtcttttgggggtaacctcgggcgagcagtcttccaggccaaaaagaggcttcttgaacctcttggtctggttgaggaagcggctaagacggctcctggaaagaagaggcctgtagagcagtctcctcaggaaccggactcctccgcgggtatcggcaaatcgggtgcacagcccgctaaaaagagactcaatttcggtcagactggcgacacagagtcagtcccagaccctcaaccaatcggagaacctcccgcagccccctcaggtgtgggatctcttacaatggcttcaggtggtggcgcaccagtggcagacaataacgaaggtgccgatggagtgggtagttcctcgggaaattggcattgcgattcccaatggctgggggacagagtcatcaccaccagcacccgaacctgggccctgcccacctacaacaatcacctctacaagcaaatctccaacagcacatctggaggatcttcaaatgacaacgcctacttcggctacagcaccccctgggggtattttgacttcaacagattccactgccacttctcaccacgtgactggcagcgactcatcaacaacaactggggattccggcctaagcgactcaacttcaagctcttcaacattcaggtcaaagaggttacggacaacaatggagtcaagaccgtcgccaataaccttaccagcacggtccaggtcttcacggactcagactatcagctcccgtacgtgctcgggtcggctcacgagggctgcctcccgccgttcccagcggacgttttcatgattcctcagtacgggtatctgacgcttaatgatggaagccaggccgtgggtcgttcgtccttttactgcctggaatatttcccgtcgcaaatgctaagaacgggtaacaacttccagttcagctacgagtttgagaacgtacctttccatagcagctacgctcacagccaaagcctggaccgactaatgaatccactcatcgaccaatacttgtactatctctcaaagactattaacggttctggacagaatcaacaaacgctaaaattcagtgtggccggacccagcaacatggctgtccagggaagaaactacatacctggacccagctaccgacaacaacgtgtctcaaccactgtgactcaaaacaacaacagcgaatttgcttggcctggagcttcttcttgggctctcaatggacgtaatagcttgatgaatcctggacctgctatggccagccacaaagaaggagaggaccgtttctttcctttgtctggatctttaatttttggcaaacaaggaactggaagagacaacgtggatgcggacaaagtcatgataaccaacgaagaagaaattaaaactactaacccggtagcaacggagtcctatggacaagtggccacaaaccaccagagtgcccaagcacaggcgcagaccggctgggttcaaaaccaaggaatacttccgggtatggtttggcaggacagagatgtgtacctgcaaggacccatttgggccaaaattcctcacacggacggcaactttcacccttctccgctgatgggagggtttggaatgaagcacccgcctcctcagatcctcatcaaaaacacacctgtacctgcggatcctccaacggccttcaacaaggacaagctgaactctttcatcacccagtattctactggccaagtcagcgtggagatcgagtgggagctgcagaaggaaaacagcaagcgctggaacccggagatccagtacacttccaactattacaagtctaataatgttgaatttgctgttaatactgaaggtgtatatagtggaccccgccccattggcaccagatacctgactcgtaatctg

SEQ ID NO: 634 - DNA, 2208 bp, Artificial Sequence
  source: /note="Description of Artificial Sequence: Synthetic polynucleotide"
atggctgccgatggttatcttccagattggctcgaggacaaccttagtgaaggaattcgcgagtggtgggctttgaaacctggagcccctcaacccaaggcaaatcaacaacatcaagacaacgctcgaggtcttgtgcttccgggttacaaataccttggacccggcaacggactcgacaagggggagccggtcaacgcagcagacgcggcggccctcgagcacgacaaggcctacgaccagcagctcaaggccggagacaacccgtacctcaagtacaaccacgccgacgccgagttccaggagcggctcaaagaagatacgtcttttgggggcaacctcgggcgagcagtcttccaggccaaaaagaggcttcttgaacctcttggtctggttgaggaagcggctaagacggctcctggaaagaagaggcctgtagagcagtctcctcaggaaccggactcctccgcgggtattggcaaatcgggtgcacagcccgctaaaaagagactcaatttcggtcagactggcgacacagagtcagtcccagaccctcaaccaatcggagaacctcccgcagccccctcaggtgtgggatctcttacaatggcttcaggtggtggcgcaccagtggcagacaataacgaaggtgccgatggagtgggtagttcctcgggaaattggcattgcgattcccaatggctgggggacagagtcatcaccaccagcacccgaacctgggccctgcccacctacaacaatcacctctacaagcaaatctccaacagcacatctggaggatcttcaaatgacaacgcctacttcggctacagcaccccctgggggtattttgacttcaacagattccactgccacttctcaccacgtgactggcagcgactcatcaacaacaactggggattccggcctaagcgactcaacttcaagctcttcaacattcaggtcaaagaggttacggacaacaatggagtcaagaccatcgccaataaccttaccagcacggtccaggtcttcacggactcagactatcagctcccgtacgtgctcgggtcggctcacgagggctgcctcccgccgttcccagcggacgttttcatgattcctcagtacgggtatctgacgcttaatgatggaagccaggccgtgggtcgttcgtccttttactgcctggaatatttcccgtcgcaaatgctaagaacgggtaacaacttccagttcagctacgagtttgagaacgtacctttccatagcagctacgctcacagccaaagcctggaccgactaatgaatccactcatcgaccaatacttgtactatctctcaaagactattaacggttctggacagaatcaacaaacgctaaaattcagtgtggccggacccagcaacatggctgtccagggaagaaactacatacctggacccagctaccgacaacaacgtgtctcaaccactgtgactcaaaacaacaacagcgaatttgcttggcctggagcttcttcttgggctctcaatggacgtaatagcttgatgaatcctggacctgctatggccagccacaaagaaggagaggaccgtttctttcctttgtctggatctttaatttttggcaaacaaggaactggaagagacaacgtggatgcggacaaagtcatgataaccaacgaagaagaaattaaaactactaacccggtagcaacggagtcctatggacaagtggccacaaaccaccagagtgcccaagcacaggcgcagaccggctgggttcaaaaccaaggaatacttccgggtatggtttggcaggacagagatgtgtacctgcaaggacccatttgggccaaaattcctcacacggacggcaactttcacccttctccgctgatgggagggtttggaatgaagcacccgcctcctcagatcctcatcaaaaacacacctgtacctgcggatcctccaacggccttcaacaaggacaagctgaactctttcatcacccagtattctactggccaagtcagcgtggagatcgagtgggagctgcagaaggaaaacagcaagcgctggaacccggagatccagtacacttccaactattacaagtctaataatgttgaatttgctgttaatactgaaggtgtatatagtgaaccccgccccattggcaccagatacctgactcgtaatctg

SEQ ID NO: 635 - DNA, 2208 bp, Artificial Sequence
  source: /note="Description of Artificial Sequence: Synthetic polynucleotide"
atggctgccgatggttatcttccagattggctcgaggacaaccttagtgaaggaattcgcgagtggtgggctttgaaacctggagcccctcaacccaaggcaaatcaacaacgtcaagacaacgctcgaggtcttgtgcttccgggttacaaataccttggacccggcaacggactcgacaagggggagccggtcaacgcagcagacgcggcggccctcgagcacgacaaggcctacgaccagcagctcaaggccggaggcaacccgtgcctcaagtacaaccacgccgacgccgagttccaggagcggctcaaagaagatacgtcttttgggggcaacctcgggcgagcagtcttccaggccaaaaagaggcttcttgaacctcttggtctggttgaggaagcggctaagacggctcctggaaagaagaggcctgtagagcagtctcctcaggaaccggactcctccgcgggtattggcagatcgggtgcacagcccgctaaaaagagactcaatttcggtcagactggcgacacagagtcagtcccagaccctcaaccaatcggagaacctcccgcagccccctcaggtgtgggatctcttacaatggcttcaggtggtggcgcaccagtggcagacaataacgaaggtgccgatggagtgggtagttcctcgggaaattggcattgcgattcccaatggctgggggacagagtcatcaccaccagcacccgaacctgggccctgcccacctacaacaatcacctctacaagcaaatctccaacagcacatctggaggatcttcaaatgacaacgcctacttcggctacagcaccccctgggggtattttgacttcaacagattccactgccacttctcaccacgtgactggcagcgactcatcaacaacaactggggattccggcctaagcgactcaacttcaagctcttcaacattcaggtcaaagaggttacggacaacaatggagtcaaggccatcgccaataaccttaccagcacggtccaggtcttcacggactcagactatcagctcccgtacgtgctcgggtcggctcacgagggctgcctcccgccgttcccagcggacgttttcatgattcctcagtacgggtatctgacgcttaatgatggaagccaggccgtgggtcgttcgtccttttactgcctggaatatttcccgtcgcaaatgctaagaacgggtaacaacttccagttcagctacgagtttgagaacgtacctttccatagcagctacgctcacagccaaagcctggaccgactaatgaatccactcatcgaccaatacttgtactatctctcaaagactattgacggttctggacagaatcaacaaacgctaaaattcagtgtggccggacccagcaacatggctgtccagggaagaaactacatacctggacccagctaccgacaacaacgtgtctcaaccactgtgactcaaaacaacaacagcgaatttgcttggcctggagcttcttcttgggctctcaatggacgtaatagcttgatggatcctggacctgctatggccagccacaaagaaggagaggaccgtttctttcctttgtctggatctttaatttttggcaaacaaggaactggaagagacaacgtggatgcggacaaagtcatgataaccaacgaagaagaaattaaaactactaacccggtagcaacggagtcctatggacaagtggccacaaaccaccagagtgcccaagcacaggcgcagaccggctgggttcaaaaccaaggaatacttccgggtatggtttggcaggacagagatgtgtacctgcaaggacccatttgggccaaaattcctcacacgggcggcaactttcacccttctccgctgatgggagggtttggaatgaagcacccgcctcctcagatcctcatcaaaaacacacctgtacctgcggatcctccaacggccttcaacaaggacaagctgaactctttcatcacccagtattctactggccaagtcagcgtggagatcgagtgggagctgcagaaggaaaacagcaagcgctggaacccggagatccagtacacttccaactattacaagtctaataatgttgaatttgctgttaatactgaaggtgtatatagtgaaccccgccccattggcaccagatacctgactcgtaatctg

SEQ ID NO: 636 - DNA, 2208 bp, Artificial Sequence
  source: /note="Description of Artificial Sequence: Synthetic polynucleotide"
atggctgccgatggttatcttccagattggctcgaggacaaccttagtgaaggaattcgcgagtggtgggctttgaaacctggagcccctcaacccaaggcaaatcaacaacatcaagacaacgctcgaggtcttgtgcttccgggttacaaataccttggacccggcaacggactcgacaagggggagccggtcaacgcagcagacgcggcggccctcgagcacgacaaggcctacgaccagcagctcaaggccggagacaacccgtacctcaagtacaaccacgccgacgccgagttccaggagcggctcaaagaagatacgtcttttgggggcaacctcgggcgagcagtcttccaggccaaaaagaggcttcttgaacctcttggtctggttgaggaagcggctaagacggctcctggaaagaagaggcctgtagagcagtctcctcaggaaccggactcctccgcgggtattggcaaatcgggtgcacagcccgctaaaaagagactcaatttcggtcagactggcgacacagagtcagtcccagaccctcaaccaatcggagaacctcccgcagccccctcaggtgtgggatctcttacaatggcttcaggtggtggcgcaccagtggcagacaataacgaaggtgccgatggagtgggtagttcctcgggaaattggcattgcgattcccaatggctgggggacagagtcatcaccaccagcacccgaacctgggccctgcccacctacaacaatcacctctacaagcaaatctccaacagcacatctggaggatcttcaaatgacaacgcctacttcggctacagcaccccctgggggtattttgacttcaacagattccactgccacttctcaccacgtgactggcagcgactcatcaacaacaactggggattccggcctaagcgactcaacttcaagctcttcaacattcaggtcaaagaggttacggacaacaatggagtcaagaccatcgccaataaccttaccagcacggtccaggtcttcacggactcagactatcagctcccgtacgtgctcgggtcggctcacgagggctgcctcccgccgttcccagcggacgttttcatgattcctcagtacgggtatctgacgcttaatgatggaagccaggccgtgggtcgttcgtccttttactgcctggaatatttcccgtcgcaaatgctaagaacgggtaacaacttccagttcagctacgagtttgagaacgtacctttccatagcagctacgctcacagccaaagcctggaccgactaatgaatccactcatcgaccaatacttgtactatctctcaaagactattaacggttctggacagaatcaacaaacgctaaaattcagtgtggccggacccagcaacatggctgtccagggaagaaactacatacctggacccagctaccgacaacaacgtgtctcaaccactgtgactcaaaacaacaacagcgaatttgcttggcctggagcttcttcttgggctctcaatggacgtaatagcttgatgaatcctggacctgctatggccagccacaaagaaggagaggaccgtttctttcctttgtctggatctttaatttttggcaaacaaggaactggaagagacaacgtggatgcggacaaagtcatgataaccaacgaagaagaaattaaaactactaacccggtagcaacggagtcctatggacaagtggccacaaaccaccagagtgcccaagcacaggcgcagaccggctgggttcaaaaccaaggaatacttccgggtatggtttggcaggacagagatgtgtacctgcaaggacccatttgggccaaaattcctcacacggacggcaactttcacccttctccgctgatgggagggtttggaatgaagcacccgcctcctcagatcctcatcaaaaacacacctgtacctgcggatcctccaacggccttcaacaaggacaagctgaactctttcatcacccagtattctactggccaagtcagcgtggagatcgagtgggagctgcagaaggaaaacagcaagcgctggaacccggagatccagtacacttccaactattacaagcctaataatgttgaatttgctgttaatactgaaggtgtatatagtgaaccccgccccattggcaccagatacctgactcgtaatctg

SEQ ID NO: 637 - DNA, 2208 bp, Artificial Sequence
  source: /note="Description of Artificial Sequence: Synthetic polynucleotide"
atggctgccgatggttatcttccagattggctcgaggacaaccttagtgaaggaattcgcgagtggtgggctttgaaacctggagcccctcaacccaaggcaaatcaacaacatcaagacaacgctcgaggtcttgtgcttccgggttacaaataccttggacccggcaacggactcgacaagggggagccggtcaacgcagcagacgcggcggccctcgagcacaacaaggcctacgaccagcagctcaaggccggagacaacccgtacctcaagtgcaaccacgccgacgccgagttccaggagcggctcaaagaagatacgtcttttgggggcaacctcgggcgagcagtcttccaggccaaaaagaggcctcttgaacctcttggtctggttgaggaagcggctaagacggctcctggaaagaagaggcctgtagagcagtctcctcaggaaccggactcctccgcgggtattggcaaatcgggtgcacagcccgctaaaaagagactcaatttcggtcagactggcgacacagagtcagtcccagaccctcaaccaatcggagaacctcccgcagccccctcaggtgtgagatctcttacaatggcttcaggtggtggcgcaccagtggcagacaataacgaaggtgccgatggagtgggtagttcctcgggaaattggcattgcgattcccaatggctgggggacagagtcatcaccaccagcacccgaacctgggccctgcccacctacaacaatcacctctacaagcaaatctccaacagcacatctggaggatcttcaaatgacaacgcctacctcggctacagcaccccctgggggtattttgacttcaacagattccactgccacttctcaccacgtgactggcagcgactcatcaacaacaactggggattccggcctaagcgactcaacttcaagctcttcaacattcaggtcaaagaggttacggacaacaatggagtcaagaccatcgccaataaccttaccagcacggtccaggtcttcacggactcagactatcagctcccgtacgtgctcgggtcggctcacgagggctgcctcccgccgttcccagcggacgttttcatgattcctcagtacgggtatctgacgcttaatgatggaagccaggccgtgggtcgttcgtccttttactgcctggaatatttcccgtcgcaaatgctaagaacgggtaacaacttccagttcagctacgagtttgagaacgtacctttccatagcagctacgctcacagccaaagcctggaccgactaatgaatccactcatcgaccaatacttgtactatctctcaaagactattaacggttctggacagaatcaacaaacgctaaaattcagtgtggccggacccagcaacatggctgtccagggaagaaactacatacctggacccagctaccgacaacaacgtgtctcaaccactgtgactcaaaacaacaacagcgaatttgcttggcctggagcttcttcttgggctctcaatggacgtaatagcttgatgaatcctggacctactatggccagccacaaagaaggagaggaccgtttctttcctttgtctggatctttaatttttggcaaacaaggaactggaagagacaacgtggatgcggacaaagtcatgataaccaacgaagaagaaattaaaactactaacccggtagcaacggagtcctatggacaagtggccacaaaccaccagagtgcccaagcacaggcgcagaccggctgggttcaaaaccaaggaatacttccgggtatggtttggcaggacagagatgtgtacctgcaaggacccatttgggccaaaattcctcacacggacggcaactttcacccttctccgctgatgggagggtttggaatgaagcacccgcctcctcagatcctcatcaaaaacacacctgtacctgcggatcctccaacggccttcaacaaggacaagctgaactctttcatcacccagtattctactggccaagtcagcgtggagatcgagtgggagctgcagaaggaaaacagcaagcgctggaacccggagatccagtacacttccaactattacaagtctaataatgttgaatttgctgttaatactgaaggtgtatatagtgaaccccgccccattggcaccagatacctgactcgtaatctg

SEQ ID NO: 638 - DNA, 2208 bp, Artificial Sequence
  source: /note="Description of Artificial Sequence: Synthetic polynucleotide"
atggctgccgatggttatcttccagattggctcgaggacaaccttagtgaaggaattcgcgagtggtgggctttgaaacctggagcccctcaacccaaggcaaatcaacaacatcaagacaacgctcgaggtcttgtgcttccgggttacaaataccttggacccggcaacggactcgacaagggggagccggtcaacgcagcagacgcggcggccctcgtgcacgacaaggcctacgaccagcagctcaaggccggagacaacccgtacctcaagtgcaaccacgccgacgccgagttccaggagcggctcaaagaagatacgtcttttgggggcaacctcgggcgagcagtcttccaggccaaaaagaggcttcttgaacctcttggtctggttgaggaagcggctaagacggctcctggaaagaagaggcctgtagagcagtctcctcaggaaccggactcctccgcgggtattggcaaatcgggtgcacagcccgctaaaaagagactcaatttcggtcagactggcgacacagagtcagtcccagaccctcaaccaatcggagaacctcccgcagccccctcaggtgtgggatctcttacaatggcttcaggtggtggcgcaccagtggcagacaataacgaaggtgccgatggagtgggtagttcctcgggaaattggcattgcgattcccaatggctgggggacagagtcatcaccaccagcacccgaacctgggccctgcccacctacaacaatcacctctacaagcaaatctccaacagcacatctggaggatcttcaaatgacaacgcctacctcggctacagcaccccctgggggtattttgacttcaacagattccactgccacttctcaccacgtgactggcagcgactcatcaacaacaactggggattccggcctaagcgactcaacttcaagctcttcaacattcaggtcaaagaggttacggacaacaatggagtcaagaccatcgccaataaccttaccagcacggtccaggtcttcacggactcagactatcagctcccgtacgtgctcgggtcggctcacgagggctgcctcccgccgttcccagcggacgttttcacgattcctcagtacgggtatctgacgcttaatgatggaagccaggccgtgggtcgttcgtccttttactgcctggaatatttcccgtcgcaaatgctaagaacgggtaacaacttccagttcagctacgagtttgagaacgtacctttccatagcagctacgctcacagccaaagcctggaccgactaatgaatccactcatcgaccaatacttgtactatctctcaaagactattaacggttctggacagaatcaacaaacgctaaaattcagtgtggccggacccagcaacatggctgtccagggaagaaactacatacctggacccagctaccgacaacaacgtgtctcaaccactgtgactcaaaacaacaacagcgaatttgcttggcctggagcttcttcttgggctctcaatggacgtaatagcttgatgaatcctggacctgctatggccagccacaaagaaggagaggaccgtttctttcctttgtctggatctttaatttttggcaaacaaggaactggaagagacaacgtggatgcggacaaagtcatgataaccaacgaagaagaaattaaaactactaacccggtagcaacggagtcctatggacaagtggccacaaaccaccagagtgcccaagcacaggcgcagaccggctgggttcaaaaccaaggaatacttccgggtatggtttggcaggacagagatgtgtacctgcaaggacccatttgggccaaaattcctcacacggacggcaactttcacccttctccgctgatgggagggtttggaatgaagcacccgcctcctcagatcctcatcaaaaacacacctgtacctgcggatcctccaacggccttcaacaaggacaagctgaactctttcatcacccagtattctactggccaagtcagcgtggagatcgagtgggagctgcagaaggaaaacagcaagcgctggaacccggagatccagtacacttccaactattacaagtctaataatgttgaatttgctgttaatactgaaggtgtatatagtgaaccccgccccattgggccccgatacctgactcgtaatttt

SEQ ID NO: 639 - DNA, 2208 bp, Artificial Sequence
  source: /note="Description of Artificial Sequence: Synthetic polynucleotide"
atggctgccgatggttatcttccagattggctcgaggacaaccttagtgaaggaattcgcgagtggtgggctttgaaacctggagcccctcaacccaaggcaaatcaacaacatcaagacaacgctcgaggtcttgtgcttccgggttacaaataccttggacccggcaacggactcgacaagggggagccggtcaacgcagcagacgcggcggccctcgagcacaacaaggcctacgaccagcagctcaaggccggagacaacccgtacctcaagtgcaaccacgccgacgccgagttccaggagcggctcaaagaagatacgtcttttgggggcaacctcgggcgagcagtcttccaggccaaaaagaggcttcttgaacctcttggtctggttgaggaagcggctaagacggctcctggaaagaagaggcctgtagagcagtctcctcaggaaccggactcctccgcgggtattggcaaatcgggtgcacagcccgctaaaaagagactcaatttcggtcagactggcgacacagagtcagtcccagaccctcaaccaatcggagaacctcccgcagccccctcaggtgtgagatctcttacaatggcttcaggtggtggcgcaccagtggcagacaataacgaaggtgccgatggagtgggtagttcctcgggaaattggcattgcgattcccaatggctgggggacagagtcatcaccaccagcacccgaacctgggccctgcccacctacaacaatcacctctacaagcaaatctccaacagcacatctggaggatcttcaaatgacaacgcctacctcggctacagcaccccctgggggtattttgacttcaacagattccactgccacttctcaccacgtgactggcagcgactcatcaacaacaactggggattccggcctaagcgactcaacttcaagctcttcaacattcaggtcaaagaggttacggacaacaatggagtcaagaccatcgccaataaccttaccagcacggtccaggtcttcacggactcagactatcagctcccgtacgtgctcgggtcggctcacgagggctgcctcccgccgttcccagcggacgttttcatgattcctcagtacgggtatctgacgcttaatgatggaagccaggccgtgggtcgttcgtccttttactgcctggaatatttcccgtcgcaaatgctaagaacgggtaacaacttccagttcagctacgagtttgagaacgtacctttccatagcagctacgctcacagccaaagcctggaccgactaatgaatccactcatcgaccaatacttgtactatctctcaaagactattaacggttctggacagaatcaacaaacgctaaaattcagtgtggccggacccagcaacatggctgtccagggaagaaactacatacctggacccagctaccgacaacaacgtgtctcaaccactgtgactcaaaacaacaacagcgaatttgcttggcctggagcttcttcttgggctctcaatggacgtaatagcttgatgaatcctggacctgctatggccagccacaaagaaggagaggaccgtttctttcctttgtctggatctttaatttttggcaaacaaggaactggaagagacaacgtggatgcggacaaagtcatgataaccaacgaagaagaaattaaaactactaacccggtagcaacggagtcctatggacaagtggccacaaaccaccagagtgcccaagcacaggcgcagaccggctgggttcaaaaccaaggaatacttccgggtatggtttggcaggacagagatgtgtacctgcaaggacccatttgggccaaaattcctcacacggacggcaactttcacccttctccgctgatgggagggtttggaatgaagcacccgcctcctcagatcctcatcaaaaacacacctgtacctgcggatcctccaacggccttcaacaaggacaagctgaactctttcatcacccagtattctactggccaagtcagcgtggagatcgagtgggagctgcagaaggaaaacagcaagcgctggaacccggagatccagtacacttccaactattacaagtctaataatgttgaatttgctgttaatactgaaggtgtatatagtgaaccccgccccattggcaccagatacctgactcgtaatctg

SEQ ID NO: 640 - DNA, 2208 bp, Artificial Sequence
  source: /note="Description of Artificial Sequence: Synthetic polynucleotide"
atggctgccgatggttatcttccagattggctcgaggacaaccttagtgaaggaattcgcgagtggtgggctttgaaacctggagcccctcaacccaaggcaaatcaacaacatcaagacaacgctcgaggtcttgtgcttccgggttacaaataccttggacccggcaacggactcgacaagggggagccggtcaacgcagcagacgcggcggccctcgagcacgacaaggcctacgaccagcagctcaaggccggagacaacccgtacctcaagtgcaaccacgccgacgccgagttccaggagcggctcaaagaagatacgtcttttgggggcaacctcgggcgagcagtcttccaggccaaaaagaggcttcttgaacctcttggtctggttgaggaagcggctaagacggctcctggaaagaagaggcctgtagagcagtctcctcaggaaccggactcctccgcgggtattggcaaatcgggtgcacagcccgctaaaaagagactcaatttcggtcagactggcgacacagagtcagtcccagaccctcaaccaatcggagaacctcccgcagccccctcaggtgtgggatctcttacaatggcttcaggcggtggcgcaccagtggcagacaataacgaaggtgccgatggagtgggtagttcctcgggaaattggcattgcgattcccaatggctgggggacagagtcatcaccaccagcacccgaacctgggccctgcccacctacaacaatcacctctacaagcaaatctccaacagcacatctggaggatcttcaaatgacaacgcctacctcggctacagcaccccctgggggtattttgacttcaacagattccactgccacttctcaccacgtgactggcagcgactcatcaacaacaactggggattccggcctaagcgactcaacttcgagctcttcaacattcaggtcaaagaggttacggacaacaatggagtcaagaccatcgccaataaccttaccagcacggtccaggtcttcacggactcagactatcagctcccgtacgtgctcgggtcggctcacgagggctgcctcccgccgttcccagcggacgttttcatgattcctcagtacgggtatctgacgcttaatgatggaagccaggccgtgggtcgttcgtccttttactgcctggaatatttcccgtcgcaaatgctaagaacgggtaacaacttccagtccagctacgagtttgagaacgtacctttccatagcagctacgctcacagccaaagcctggaccgactaatgaatccactcatcgaccaatacttgtactatctctcaaagactattaacggttctggacagaatcaacaaacgctaaaattcagtgtggccggacccagcaacatggctgtccagggaagaaactacatacctggacccagctaccgacaacaacgtgcctcaaccactgtgactcaaaacaacaacagcgaatttgcttggcctggagcttcttcttgggctctcaatggacgtaatagcttgatgaatcctggacctgctatggccagccacaaagaaggggaggaccgtttctttcctttgtctggatctttaatttttggcaaacaaggaactggaagagacaacgtggatgcggacaaagtcatgataaccaacgaagaagaaattaaaactactaacccggtagcaacggagtcctatggacaagtggccacaaaccaccagagtgcccaagcacaggcgcagaccggctgggttcaaaaccaaggaatacttccgggtatggtttggcaggacagagatgtgtacctgcaaggacccatttgggccaaaattcctcacacggacggcaactttcacccttctccgctgatgggagggtttggaatgaagcacccgcctcctcagatcctcatcaaaaacacacctgtacctgcggatcctccaacggccttcaacaaggacaagctgaactctttcatcacccagtattctactggccaagtcagcgtggagatcgagtgggagctgcagaaggaaaacagcaagcgctggaacccggagatccagtacacttccaactattacaagtctaataatgttgaatttgctgttaatactgaaggtgtatatagtgaaccccgccccattggcaccagatacctgactcgtaatctg

SEQ ID NO: 641 - DNA, 2208 bp, Artificial Sequence
  source: /note="Description of Artificial Sequence: Synthetic polynucleotide"
atggctgccgatggttatcttccagattggctcgaggacaaccttagtgaaggaattcgcgagtggtgggctttgaaacctggagcccctcaacccaaggcaaatcaacaacatcaagacaacgctcgaggtcttgtgcttccgggttacaaataccttggacccggcaacggactcgacaagggggagccggtcaacgcagcagacgcggcggccctcgagcacgacaaggcctacgaccagcagctcaaggccggagacaacccgtacctcaagtgcaaccacgccgacgccgagttccaggagcggctcaaagaagatacgtcttttgggggcaacctcgggcgagcagtcttccaggccaaaaagaggcttcttgaacctcttggtctggttgaggaagcggctaagacggctcctggaaagaagaggcctgtagagcagtctcctcaggaaccggactcctccgcgggtattggcaaatcgggtgcacagcccgctaaaaagagactcaatttcggtcagactggcgacacagagtcagtcccagaccctcaaccaatcggagaacctcccgcagcccccccaggtgtgggatctcttacaatggcttcaggtggtggcgcaccagtggcggacaataacgaaggtgccgatggagtgggtagttcctcgggaaattggcattgcgattcccaatggctgggggacagagtcatcaccaccagcacccgaacctgggccctgcccacctacaacaatcacctctacaagcaaatctccaacagcacatctggaggatcttcaaatgacaacgcctacctcggctacagcaccccctgggggtattttgacttcaacagattccactgccacttctcaccacgtgactggcagcgactcatcaacaacaactggggattccggcctaagcgactcaacttcaagctcttcaacattcaggtcaaagaggttacggacaacaatggagtcaagaccatcgccaataaccttaccagcacggtccaggtcttcacggactcagactatcagctcccgtacgtgctcgggtcggctcacgagggctgcctcccgccgttcccagcggacgttttcatgattcctcagtacgggtatctgacgcttaatgatggaagccaggccgtgggtcgttcgtccttttactgcctggaatatttcccgtcgcaaatgctaagaacgggtaacaacttccagttcagctacgagtttgagaacgtacctttccatagcagctacgctcacagccaaagcctggaccgactaatgaatccactcatcgaccaatacttgtactatctctcaaagactattagcggttctggacagaatcaacaaacgctaaaattcagtgtggccggacccagcaacatggctgtccagggaagaaactacatacctggacccagctaccgacaacaacgtgtctcaaccactgtgactcaaaacaacagcagcgaatttgcttggcctggagcttcttcttgggctctcaatggacgtaatagcttgatgaatcctggacctgctatggccagccacaaagaaggagaggaccgtttctttcctttgtctggatctttaatttttggcaaacaaggaactggaagagacaacgtggatgcggacaaagtcatgataaccaacgaagaagaaattaaaactactaacccggtagcaacggagtcctatggacaagtggccacaaaccaccagagtgcccaagcacaggcgcagaccggctgggttcaaaaccaaggaatactttcgggtatggtttggcaggacagagatgtgtacctgcaaggacccatttgggccaaaattcctcacacggacggcaactttcacccttctccgctgatgggagggtttggaatgaagcacccgcctcctcagatcctcatcaaaaacacacctgtacctgcggatcctccaacggccttcaacaaggacaagctgaactctttcatcacccagtattctactggccaagtcagcgtggagatcgagtgggagctgcagaaggaaaacagcaagcgctggaacccggagatccagtacacttccaactattacaagtctaataatgttgaatttgctgttaatactgaaggtgtatatagtgaaccccgccccattggcaccagatacctgactcgtaatctg

SEQ ID NO: 642 - DNA, 2208 bp, Artificial Sequence
  source: /note="Description of Artificial Sequence: Synthetic polynucleotide"
atggctgccgatggttatcttccagattggctcgaggacaaccttagtgaaggaattcgcgagtggtgggctttgaaacctggagcccctcaacccaaggcaaatcaacaacatcaagacaacgctcgaggtcttgtgcttccgggttacaaataccttggacccggcaacggactcgacaagggggagccggtcaacgcagcagacgcggcggccctcgagcacgacaaggcctacgaccagcagctcaaggccggagacaacccgtacctcaagtgcaaccacgccgacgccgagttccaggagcggctcaaagaagatacgtcttttgggggcaacctcgggcgagcagtcttccaggccaaaaagaggcttcttgaacctcttggtctggttgaggaagcggctaagacggctcctggaaagaagaggcctgtagagcagtctcctcaggaaccggactcctccgcgggtattggcaaatcgggtgcacagcccgctaaaaagagactcaatttcggtcagactggcgacacagagtcagtcccagaccctcaaccaatcggagaacctcccgcagccccctcaggtgtgggatctcttacaatggcttcaggtggtggcgcaccagtggcagacaataacgaaggtgccgatggagtgggtagttcctcgggaaattggcattgcgattcccaatggctgggggacagagtcatcaccaccagcacccgaacctgggccctgcccacctacaacaatcacctctacaagcaaatctccaacagcacatctggaggatcttcaaatgacaacgcctacctcggctacagcaccccctgggggtattttgacttcaacagattccactgccacttctcaccacgtgactggcagcgactcatcaacaacaactggggattccggcctaagcgactcaacttcaagctcttcaacattcaggtcaaagaggttacggacaacaatggagtcaagaccatcgccaataaccttaccagcacggtccaggtcttcacggactcagactatcagctcccgtacgtgctcgggtcggctcacgagggctgcctcccgccgttcccagcggacgttttcatgattcctcagtacgggtatctgacgcttaatgatggaagccaggccgtgggtcgttcgtccttttactgcctggaatatttcccgtcgcaaatgctaagaacgggtaacaacttccagttcagctacgagtttgagaacgtacctttccatagcagctacgctcacagccaaagcctggaccgactaatgaatccactcatcgaccaatacttgtactatctctcaaagactattaacggttctggacagaatcaacaaacgctaaaattcagtgtggccggacccagcaacatggctgtccagggaagaaactacatacctggacccagctaccgacaacaacgtgtctcaaccactgtgactcaaaacaacaacagcgaatttgcttggcctggagcttcttcttgggctctcaatggacgtaatagcttgatgaatcctggacctgctatggccagccacaaagaaggagaggaccgtttctttcctttgtctggatctttaatttttggcaaacaaggaactggaagagacaacgtggatgcggacaaagtcatgataaccaacgaagaagaaattaaaactactaacccggtagcaacggagtcctatggacaagtggccacaaaccaccagagtgcccaagcacaggcgcagaccggctgggttcaaaaccaaggaatacttccgggtatggtttggcaggacagagatgtgtacctgcaaggacccatttgggccaaaattcctcacacggacggcaactttcacccttctccgctgatgggagggtttggaatgaagcacccgcctcctcagatcctcatcaaaaacacacctgtacctgcggatcctccaacggccttcaacaaggacaagctgaactctttcatcacccagtattctactggccaagtcagcgtggagatcgagtgggagctgcagaaggaaaacagcaagcgctggaacccggagatccagtacacttccaactattacaagtctaataatgttgaatttgctgttaatactgaaggtgtatatagtgaaccccgccccattggcaccagatacctgactcgtaatctg

SEQ ID NO: 643 - DNA, 2208 bp, Artificial Sequence; identical to SEQ ID NO: 642
  source: /note="Description of Artificial Sequence: Synthetic polynucleotide"

SEQ ID NO: 644 - DNA, 2208 bp, Artificial Sequence
  source: /note="Description of Artificial Sequence: Synthetic polynucleotide"
atggctgccgatggttatcttccagattggctcgaggacaaccttagtgaaggaattcgcgagtggtgggctttgaaacctggagcccctcaacccaaggcaaatcaacaacatcaagacaacgctcgaggtcttgtgcttccgggttacaaataccttggacccggcaacggactcgacaagggggagccggtcaacgcagcagacgcggcggccctcgagcacgacaaggcctacgaccagcagctcaaggccggagacaacccgtacctcaagtgcaaccacgccgacgccgagttccaggagcggctcaaagaagatacgtcttttgggggcaacctcgggcgagcagtcttccaggccaaaaagaggcttcttgaacctcttggtctggttgaggaagcggctaagacggctcctggaaagaagaggcctgtagagcagtctcctcaggaaccggactcctccgcgggtattggcaaatcgggtgcacagcccgctaaaaagagactcaatttcggtcagactggcgacacagagtcagtcccagaccctcaaccaatcggagaacctcccgcagccccctcaggtgtgggatctcttacaatggcttcaggtggtggcgcaccagtggcagacaataacgaaggtgccgatggagtgggtagttcctcgggaaattggcattgcgattcccaatggctgggggacagagtcatcaccaccagcacccgaacctgggccctgcccacctacaacaatcacctctacaagcaaatctccaacagcacatctggaggatcttcaaatgacaacgcctacctcgactacagcaccccctgggggtattttgacttcaacagattccactgccacttctcaccacgtgactggcagcggctcatcaacaacaactggggattccggcctaagcgactcaacttcaagctcttcaacattcaggtcaaagaggttacggacaacaatggagtcaagaccatcgccaataaccttaccagcacggtccaggtcttcacggactcagactatcagctcccgtacgtgctcgggtcggctcacgagggctgcctcccgccgttcccagcggacgttttcatgattcctcagtacgggtatctgacgcttaatgatggaagccaggccgtgggtcgttcgtccttttactgcctggaatatttcccgtcgcaaatgctaagaacgggtaacaacttccagttcagctacgagtttgagaacgtacctttccatagcagctacgctcacagccaaagcctggaccgactaatgaatccactcatcgaccaatacttgtactatctctcaaagactattaacggttctggacagaatcaacaaacgctaaaattcagtgtggccggacccagcaacatggctgtccagggaagaaactacatacctggacccagctaccgacaacaacgtgtctcaaccactgtgactcaaaacaacaacagcgaatttgcttggcctggagcttcttcttgggctctcaatggacgtaatagcttgatgaatcctggacctgctatggccagccacaaagaaggagaggaccgtttctttcctttgtctggatctttaatttttggcaaacaaggaactggaagagacaacgtggatgcggacaaagtcatgataaccaacgaagaagaaattaaaactactaacccggtagcaacggagtcctatggacaagtggccacaaaccaccagagtgcccaagcacaggcgcagaccggctgggttcaaaaccaaggaatacttccgggtatggtttggcagggcagagatgtgtacctgcaaggacccatttgggccaaaattcctcacacggacggcaactttcacccttctccgctgatgggagggtttggaatgaagcacccgcctcctcagatcctcatcaaaaacacacctgtacctgcggatcctccaacggccttcaacaaggacaagctgaactctttcatcacccagtattctactggccaagtcagcgtggagatcgagtgggagctgcagaaggaaaacagcaagcgctggaacccggagatccagtacacttccaactattacaagtctaataatgttgaatttgctgttaatactgaaggtgtatatagtgaaccccgccccattggcaccagatacctgactcgtaatctg

SEQ ID NO: 645 - DNA, 2208 bp, Artificial Sequence; identical to SEQ ID NO: 642
  source: /note="Description of Artificial Sequence: Synthetic polynucleotide"

SEQ ID NO: 646 - DNA, 2208 bp, Artificial Sequence
  source: /note="Description of Artificial Sequence: Synthetic polynucleotide"
atggctgccgatggttatcctccagattggctcgaggacaaccttagtgaaggaattcgcgagtggtgggctttgaaacctggagcccctcaacccaaggcaaatcaacaacatcaagacaacgctcgaggtcttgtgcttccgggttacaaataccttggacccggcaacggactcgacaagggggagccggtcaacgcagcagacgcggcggccctcgagcacgacaaggcctacgaccagcagctcaaggccggggacaacccgcacctcaagtacaaccacgccgacgccgagttccaggagcggctcaaagaagatacgtcttttgggggcaacctcgggcgagcagtcttccaggccaaaaagaggcttcttgaacctcttggtctggttgaggaagcggctaagacggctcctggaaagaagaggcccgtagagcagtctcctcaggaaccggactcctccgcgggtattggcaaatcgggtgcacagcccgctaagaagagactcaatttcggtcagactggcgacactgagtcagtcccagaccctcaaccaatcggagaacctcccgcagccccctcaggtgtgggatctcttacaatggcttcaggtggtggcgcaccagtggcagacaataacgaaggtgccgatggagtgggtagttcctcgggaaattggcattgcgattcccaatggctgggggacagagtcatcaccaccagcacccgaacctgggccctgcccacctacaacaatcacctctacaagcaaatctccaacagcacatctggaggatcttcaaatgacaacgcctacttcggctacagcaccccctgggggtattttgacttcaacagattccactgccacttctcaccacgtgactggcagcgactcatcaacaacaactggggattccggcctaagcgactcaacttcaagctcttcaacattcaggtcaaagaggttacggacaacaatggagtcaagaccatcgccaataaccttaccagcacggtccaggtcttcacggactcagactatcagctcccgtacgtgctcgggtcggctcacgagggctgcctcccgccgttcccagcggacgttttcatgattcctcagtacgggtatctgacgcttaatgatggaagccaggccgtgggtcgttcgtccttttactgcctggaatatttcccgtcgcaaatgctaagaacgggtaacaacttccagttcagctacgagtttgagaacgtacctttccatagcagctacgctcacagccaaagcctggaccgactaatgaatccactcatcgaccaatacttgtactatctctcaaagactattaacggttctggacagaatcaacaaacgctaaaattcagtgtggccggacccagcaacatggctgtccagggaagaaactacatacctggacccagctaccgacaacaacgtgtctcaaccactgtgactcaaaacaacaacagcgaatttgcttggcctggagcttcttcttgggctctcaatggacgtaatagcttgatgaatcctggacctgctatggccagccacaaagaaggagaggaccgtttctttcctttgtctggatctttaatttttggcaaacaaggaactggaagagacaacgtggatgcggacaaagtcatgataaccaacgaagaagaaattaaaactactaacccggtagcaacggagtcctatggacaagtggccacaaaccaccagagtgcccaagcacaggcgcagaccggctgggttcaaaaccaaggaatacttccgggtatggtttggcaggacagagatgtgtacctgcaaggacccatttgggccaaaattcctcacacggacggcaactttcacccttctccgctgatgggagggtttggagtgaagcacccgcctcctcagatcctcatcaaaaacacacctgtacctgcggatcctccaacggccttcaacaaggacaggctgaactctttcatcacccagtattctactggccaagtcagcgtggagatcgagtgggagctgcagaaggaaaacagcaagcgctggaacccggagatccagtacacttccaactattacaagtctaataatgttgaatttgctgttaatactgaaggtgtatatagtgaaccccgccccattggcaccagatacctgactcgtaatctg

SEQ ID NO: 647 - DNA, 2208 bp, Artificial Sequence
  source: /note="Description of Artificial Sequence: Synthetic polynucleotide"
atggctgccgatggttatcttccagattggctcgaggacaaccttagtgaaggaattcgcgagtggtgggctttgaaacctggagcccctcaacccaaggcaaatcaacaacatcaagacaacgctcgaggtcttgtgcttccgggttacaaataccttggacccggcaacggactcgacaagggggagccggtcaacgcagcagacgcggcggccctcgagcacgacaaggcctacgaccagcagctcaaggccggagacaacccgtacctcaagtacaaccacgccgacgccgagttccaggagcggctcaaagaagatacgtcttttgggggcaacctcgggcgagcagtcttccaggccaaaaagaggcttcttgaacctcttggtctggttgaggaagcggctaagacggctcctggaaagaagaggcctgtagagcagtctcctcaggaaccggactcctccgcgggtattggcaaatcgggtgcacagcccgctaaaaagagactcaatttcggtcagactggcgacacagagtcagtcccagaccctcaaccaatcggagaacctcccgcagccccctcaggtgtgggatctcttacaatggcttcaggtggtggcgcaccagtggcggacaataacgaaggtgccgatggagtgggtagttcctcgggaaattggcattgcgattcccaatggctgggggacagagtcatcaccaccagcacccgaacctgggccctgcccacctacaacaatcacctctacaagcaaatctccaacagcacatctggaggatcttcaaatgacaacgcctacttcggctacagcaccccctgggggtattttgacttcaacagattccactgccacttctcaccacgtgactggcagcgactcatcaacaacaactggggattccggcctaagcgactcaacttcaagctcttcaacattcaggtcaaagaggttacggacaacaatggagtcaagaccatcgccaataaccttaccagcacggtccaggtcttcacggactcagactatcagctcccgtacgtgctcgggtcggctcacgagggctgcctcccgccgttcccagcggacgttttcatgattcctcagtacgggtatctgacgcttaatgatggaagccaggccgtgggtcgttcgtccttttactgcctggaatatttcccgtcgcaaatgctaagaacgggtaacaacttccagttcagctacgagtttgagaacgtacctttccatagcagctacgctcacagccaaagcctggaccgactaatgaatccactcatcgaccaatacttgtactatctctcaaagactattaacggttctggacagaatcaacaaacgctaaaattcagtgtggccggacccagcaacatggctgtccagggaagaaactacatacctggacccagctaccgacaacaacgtgtctcaaccactgtgactcaaaacaacaacagcgaatttgcttggcctggagcttcttcttgggctctcaatggacgtaatagtttgatgaatcctggacctgctatggccagccacaaagaaggagaggaccgtttctttcctttgtctggatctttaatttttggcaaacaaggaactggaagagacaacgtggatgcggacaaagtcatgataaccaacgaagaagaaattaaaactactaacccggtagcaacggagtcctatggacaagtggccacaaaccaccagagtgcccaagcacaggcgcagaccggctgggttcaaaaccaaggaatacttccgggtatggtttggcaggacagagatgtgtacctgcaaggacccatttgggccaaaattcctcacacggacggcaactttcacccttctccgctgatgggagggtttggagtgaagcacccgcctcctcagatcctcatcaaaaacacacctgtacctgcggatcctccaacggccttcaacaaggacaagctgaactctttcatcacccagtattctactggccaagtcagcgtggagatcgagtgggagctgcagaaggaaaacagcaagcgctggaacccggagatccagtacacttccaactattacaagtctaataatgttgaatttgctgttaatactgaaggtgtatatagtgaaccccgccccattggcaccagatacctgactcgtaatctg

SEQ ID NO: 648 - DNA, 2208 bp, Artificial Sequence
  source: /note="Description of Artificial Sequence: Synthetic polynucleotide"
atggctgccgatggttatcttccagattggctcgaggacaaccttagtgaaggaattcgcgagtggtgggctttgaaacctggagcccctcaacccaaggcaaatcaacaacatcaagacaacgctcgaggtcttgtgcttccgggttacaaataccttggacccggcaacggactcgacaagggggagccggtcaacgcagcagacgcggcggccctcgagcacgacaaggcctacgaccagcagctcaaggccggagacaacccgtacctcaagtacaaccacgccgacgccgagttccaggagcggctcaaagaagatacgtcttttgggggcaacctcgggcgagcagtcttccaggccaaaaagaggcttcttgaacctcttggtctggttgaggaagcggctaagacggctcctggaaagaagaggcctgtagagcagtctcctcaggaaccggactcctccgcgggtattggcaaatcgggtgcacagcccgctaaaaagagactcaatttcggtcagactggcgacacagagtcagtcccagaccctcaaccaatcggagaacctcccgcagccccctcaggtgtgggatctcttacaatggcttcaggtggtggcgcaccagtggcagacaataacgaaggtgccgatggagtgggtagttcctcgggaaattggcattgcgattcccaatggctgggggacagagtcatcaccaccagcacccgaacctgggccctgcccacttacaacaatcacctctacaagcaaatctccaacagcacatctggaggatcttcaaatgacaacgcctacttcggctacagcaccccctgggggtattttgacttcaacagattccactgccacttctcaccacgtgactggcagcgactcaccaacaacaactggggattccggcctaagcgactcaacttcaagctcttcaacattcaggtcaaagaggttacggacaacaatggagtcaagaccatcgccaataaccttaccagcacggtccaggtcttcacggactcagactatcagctcccgtacgtgctcgggtcggctcacgagggctgcctcccgccgttcccagcggacgttttcatgattcctcagtacgggtatctgacgcttaatgatggaagccaggccgtgggtcgttcgtccttttactgcctggaatatatcccgtcgcaaatgctaagaacgggtaacaacttccagttcagctacgagtttgagaacgtacctttccatagcagctacgctcacagccaaagcctggaccgactaatgaatccactcatcgaccaatacttgtactatctctcaaagactattaacggttctggacagaatcaacaaacgctaaaattcagtgtggccggacccagcaacatggctgtccagggaagaaactacatacctggacccagctaccgacaacaacgtgtctcaaccactgtgactcaaaacaacaacagcgaatttgcttggcctggagcttcttcttgggctctcaatggacgtaatagcttgatgaatcctggacctgctatggccagccacaaagaaggagaggaccgtttctttcctttgtctggatctttaatttttggcaaacaaggaactggaagagacaacgtggatgcggacaaagtcatgataaccaacgaagaagaaattaaaactactaacccggtagcaacggagtcctatggacaagtggccacaaaccaccagagtgcccaagcacaggcgcagaccggctgggttcaaaaccaaggaatacttccgggtatggtttggcaggacagagatgtgtacctgcaaggacccatttgggccaaaattcctcacacggacggcaactttcacccttctccgctgatgggagggtttggagtgaagcacccgcctcctcagatcctcatcaaaaacacacctgtacctgcggatcctccaacggccttcaacaaggacaagctgaactctttcatcacccagtattctactggccaagtcagcgtggagatcgagtgggagctgcagaaggaaaacagcaagcgctggaacccggagatccagtacacttccaactattacaagtctaataatgttgaatttgctgttaatactgaaggtgtatatagtgaaccccgccccattggcaccagatacctgactcgtaatctg

SEQ ID NO: 649 - DNA, 2208 bp, Artificial Sequence
  source: /note="Description of Artificial Sequence: Synthetic polynucleotide"
atggctgccgatggttatcttccagattggctcgaggacaaccttagtgaaggaattcgcgagtggtgggctttgaaacctggagcccctcaacccaaggcaaatcaacaacatcaagacaacgctcgaggtcttgtgcttccgggttacaaataccttggacccggcaacggactcgacaagggggagccggtcaacgcagcagacgcggcggccctcgagcacgacaaggcctacgaccagcagctcaaggccggagacaacccgtacctcaagtacaaccacgccgacgccgagttccaggagcggctcaaagaagatacgtcttttgggggcaacctcgggcgagcagtcttccaggccaaaaagaggcttcttgaacctcttggtctggttgaggaagcggctaagacggctcctggaaagaagaggcctgtagagcagtctcctcaggaaccggactcctccgcgggtattggcaaatcgggtgcacagcccgctaaaaagagactcaatttcggtcagactggcgacacagagtcagtcccagaccctcaaccaatcggagaacctcccgcagccccctcaggtgtgggatctcttacaatggcttcaggtggtggcgcaccagtggcagacaataacgaaggtgccgatggagtgggtagttcctcgggaaattggcattgcgattcccaatggctgggggacagagtcatcaccaccagcacccgaacctgggccctgcccacctacaacaatcacctctacaagcaaatctccaacagcacatctggaggatcttcaaatgacaacgcctacttcggctacagcaccccctgggggtattttgacttcaacagattccactgccacttctcaccacgtgactggcagcgactcatcaacaacaactggggattccggcctaagcgactcaacttcaagctcttcaacattcaggtcaaagaggttacggacaacaatggagtcaagaccatcgccaataaccttaccagcacggtccaggtcttcacggactcagactatcagctcccgtacgtgctcgggtcggctcacgagggctgcctcccgccgttcccagcggacgttttcatgattcctcagtacgggtatctgacgcttaatgatggaagccaggccgtgggtcgttcgtccttttactgcctggaatatttcccgtcgcaaatgctaagaacgggtaacaacttccagtttagctacgagtttgagaacgtacctttccatagcagctacgctcacagccaaagcctggaccgactaatgaatccactcatcgaccaatacttgtactatctctcaaagactattaacggttctggacagaatcaacaaacgctaaaattcagtgtggccggacccagcaacatggctgtccagggaagaaactacatacctggacccagctaccgacaacaacgtgtctcaaccactgtgactcaaaacaacaacagcgaatttgcttggcctggagcttcttcttgggctctcaatggacgtaatagcttgatgaatcctggacctgctatggccagccacaaagaaggagaggaccgtttctttcctttgtctggatctttaatttctggcaaacaaggaactggaagagacaacgtggatgcgaacaaagtcatgataaccaacgaagaagaaattaaaactactaacccggtagcaacggagtcctatggacaagtggccacaaaccaccagagtgcccaagcacaggcgcagaccggctgggttcaaaaccaaggaatacttccgggtatggtttggcaggacagagatgtgtacctgcaaggacccatttgggccaaaattcctcacacggacggcaactttcacccttctccgctgatgggagggtttgaaatgaagcacccgcctcctcagatcctcatcaaaaacacacctgtacctgcggatcctccaacggccttcaacaaggacaagctgaactctttcatcacccagtattctactggccaagtcagcgtggagatcgagtgggagctgcagaaggaaaacagcaagcgctggaacccggagatccagtacacttccaactattacaagtctaataatgttgaatttgctgttaatactgaaggtgtatatagtgaaccccgccccattggcaccagatacctgactcgtaatctg

SEQ ID NO: 650 - DNA, 2208 bp, Artificial Sequence
  source: /note="Description of Artificial Sequence: Synthetic polynucleotide"
atggctgccgatggttatcttccagattggctcgaggacaaccttagtgaaggaattcgcgagtggtgggctttgaaacctggagcccctcaacccaaggcaaatcaacaacatcaagacaacgctcgaggtcttgtgcttccgggttacaaataccttggacccggcaacggactcgacaagggggagccggtcaacgcagcagacgcggcggccctcgagcacgacaaggcctacgaccagcagctcaaggccggagacaacccgtacctcaagtacaaccacgccgacgccgagttccaggagcggctcaaagaagatacgtcttttgggggcaacctcgggcgagcagtcttccaggccaaaaagaggcttcttgaacctcttggtctggttgaggaagcggctaagacggctcctggaaagaagaggcctgtagagcagtctcctcaggaaccggactcctccgcgggtattggcaaatcgggtgcacagcccgctaaaaagagactcaatttcggtcagactggcgacacagagtcagtcccagaccctcaaccaatcggagaacctcccgcagccccctcaggtgtgggatctcttacaatagcttcaggtggtggcgcaccagtggcagacaataacgaaggtgccgatggagtgggtagttcctcgggaaattggcattgcgattcccaatggctgggggacagagtcatcaccaccagcacccgaacctgggccctgcccacctacaacaatcacctctacaagcgaatctccaacagcacatctggaggatcttcaaatgacaacgcctacttcggctacagcaccccctgggggtattttgacttcaacagattccactgccacttctcaccacgtgactggcagcgactcatcaacaacaactggggattccggcctaagcgactcaacttcaagcttttcaacattcgggtcaaagaggttacggacaacaatggagtcaagaccatcaccaataaccttaccagcacggtccaggtcttcacggactcagactatcagctcccgtacgtgcttgggtcggctcacgagggctgcctcccgccgttcccagcggacgttttcatgattcctcagtacgggtatctgacgcttaatgatggaagccaggccgtgggtcgttcgtccttttactgcctggaatatttcccgtcgcaaatgctaagaacgggtaacaacttccagttcagctacgagtttgagaacgtacctttccatagcagctacgctcacagccaaagcctggaccgactaatgaatccactcatcgaccaatacttgtactatctctcaaagactattaacggttctggacagaatcaacaaacgctaaaattcagtgtggccggacccagcaacatggctgtccagggaagaaactacatacctggacccagctaccgacaacaacgtgtctcaaccactgtgactcgaaacaacaacagcgaatttgcttggcctggagcttcttcttgggctctcaatggacgtaatagcttgatgaatcctggacctgctatggccagccacaaagaaggagaggaccgtttctttcctttgtctggatctttaatttttggcaaacaaggaactggaagagacaacgtggatgcggacaaagtcatgataaccaacgaagaagaaattaaaactactaacccggtagcaacggagtcctatggacaagtggccacaaaccaccagagtgcccaagcacaggcgcagaccggctgggttcaaaaccaaggaatacttccgggtatggtttggcaggacagagatgtgtacctgcaaggacccatttgggccaaaattcctcacacggacggcaactttcacccttctccgctgatgggagggtttggagtgaagcacccgcctcctcagatcctcatcaaaaacacacctgtacctgcggatcctccaacggccttcaacaaggacaagctgaactctttcatcacccagtattctactggccaagtcagcgtggagatcgagtgggagctgcagaaggaaaacagcaagcgctggaacccggagatccagtacacttccaactattacaagtctaataatgttgaatttgctgttaatactgaaggtgtatatagtgaaccccgccccattggcaccagatacctgactcgtaatctg

SEQ ID NO: 651 - DNA, 2208 bp, Artificial Sequence
  source: /note="Description of Artificial Sequence: Synthetic polynucleotide"
atggctgccgatggttatcttccagattggctcgaggacaaccttagtgaaggaattcgcgagtggtgggctttgaaacctggagcccctcaacccaaggcaaatcaacaacatcaagacaacgctcgaggtcttgtgcttccgggttacaaataccttggacccggcaacggactcgacaagggggagccggtcaacgcagcagacgcggcggccctcgagcacgacaaggcctacgaccagcagctcaaggccggagacaacccgtacctcaagtacaaccacgccgacgccgagttccaggagcggctcaaagaagatacgtcttttgggggcaacctcgggcgagcagtcttccaggccaaaaagaggcttcttgaacctcttggtctggttgaggaagcggctaagacggctcctggaaagaagaggcctgtagagcagtctcctcaggaaccggactcctccgcgggtattggcaaatcgggcgcacagcccgctaaaaagagactcaatttcggtcagactggcgacacagagccagtcccagaccctcaaccaatcggagaacctcccgcagccccctcaggtgtgggatctcttacaatggcttcaggtggtggcgcaccagtggcagacaataacgaaggtgccgatggagtgggtagttcctcgggaaattggcattgcgattcccaatggctgggggacagagtcatcaccaccagcacccgaacctgggccctgcccacctacaacaatcacctctacaagcaaatctccaacagcacatctggaggatcttcaaatgacaacgcctacttcggctacagcaccccctgggggtattttgacttcaacagattccactgccacttctcaccacgtgactggcagcgactcatcaacaacaactggggattccggcctaagcgactcaacttcaagctcttcaacattcaggtcaaagaggttacggacaacaatggagtcaagaccatcgccaataaccttaccagcacggtccaggtcttcacggactcagactatcagctcccgtacgtgctcgggtcggctcacgagggctgcctcccgccgttcccagcgggcgttttcatgattcctcagtacgggtatctgacgcttaatgatggaagccaggccgtgggtcgttcgtccttttactgcctggaatatttcccgtcgcaaatgctaagaacgggtaacaacttccagttcagctacgagtttgagaacgtacctttccatagcagctacgctcacagccaaagcctggaccgactaatgaatccactcatcgaccaatacttgtactatctctcaaagactattaacggttctggacagaatcaacaaacgctaaaattcagtgtggccggacccagcaacatggctgtccagggaagaaactacatacctggacccagctaccgacaacaacgtgtctcaaccactgcgactcaaaacaacaacagcgaatttgcttggcctggagcttcttcttgggctctcaatggacgtaatagcttgatgaatcctggacctgctatggccagccacaaagaaggagaggaccgtttctttcctttgtctggatctttaatttttggcaaacaaggaactggaagagacaacgtggatgcggacaaagtcatgataaccaacgaagaagaaattaaaactactaacccggtagcaacggagtcctatggacaagtggccacaaaccaccagagtgcccaagcacaggcgcagaccggctgggttcaaaaccaaggaatacttccgggtatggtttggcaggacagagatgtgtacctgcaaggacccatttgggccaaaattcctcacacggacggcaactttcacccttctccgctgatgggagggtttggaatgaagcacccgcctcctcagatcctcatcaaaaacacacctgtacctgcggatcctccaacggccttcaacaaggacaagctgaactctttcatcacccagtattctactggccaagtcagcgtggagatcgagtgggagctgcagaaggaaaacagcaagcgctggaacccggagatccagtacacttccaactattacaagtctaataatgttgaatttgctgttaatactgaaggtgtatatagtgaaccccgccccattggcaccagatacctgactcgtaatctg

SEQ ID NO: 652 - DNA, 2208 bp, Artificial Sequence
  source: /note="Description of Artificial Sequence: Synthetic polynucleotide"
atggctgccgatggttatcttccagattggctcgaggacaaccttagtgaaggaattcgcgagtggtgggctttgaaacctggagcccctcaacccaaggcaaatcaacaacatcaagacaacgctcgaggtcttgtgcttccgggttacaaataccttggacccggcaacggactcgacaagggggagccggtcaacgcagcagacgcggcggccctcgagcacgacaaggcctacgaccagcagctcaaggccggagacaacccgtacctcaagtacaaccacgccgacgccgggttccaggagcggctcaaagaagatacgtcttttgggggcaacctcgggcgagcagtcttccaggccaaaaagaggcttcttgaacctcttggtctggttgaggaagcggctaagacggctcctggaaagaagaggcctgtagagcagtctcctcaggaaccggactcctccgcgggtattggcaaatcgggtgcacagcccgctaaaaagagactcaatttcggtcagactggcgacacagagtcagtcccagtccctcaaccaatcggagaacctcccgcagccccctcaggtgtgggatctcttacaatggcttcaggtggtggcgcaccagtggcagacaataacgaaggtgccgatggagtgggtagttcctcgggaaattggcattgcgattcccaatggctgggggacagagtcatcaccaccagcacccgaacctgggccctgcccacctacaacaatcacctctacaagcaaatctccaacagcacatctggaggatcttcaaatgacaacgcctacttcggctacagcaccccctgggggtattttgacttcaacagattccactgccacttctcaccacgtgactggcagcgactcatcaacaacaactggggattccggcctaagcgactcaacttcaagctcttcaacattcaggtcaaagaggttacggacaacaatggagtcaagaccatcgccaataaccttaccagcacggtccaggtcttcacggactcagactatcagctcccgtacgtgctcgggtcggctcacgagggctgcctcccgccgttcccagcggacgttttcatgattcctcagtacgggtatctgacgcttaatgatggaagccaggccgtgggtcgttcgtccttttactgcctggaatatttcccgtcgcaaatgctaagaacgggtaacaacttccagttcagctacgagtttgagaacgtacctttccatagcagctacgctcacagccaaagcctggaccgactaatgaatccactcatcgaccaatacttgtactatctctcaaagactattaacggttctggacagaatcaacaaacgctaaaattcagtgtggccggacccagcaacatggctgtccagggaagaaactacatacctggacccagctaccgacaacaacgtgtctcaaccactgtgactcaaaacaacaacagcgaatttgcttggcctggagcttcttcttgggctctcaatggacgtaatagcttgatgaatcctggacctgctatggccagccacaaagaaggagaggaccgtttctttcctttgtctggatctttaatttttggcaaacaaggagctggaagagacaacgtggatgcggacaaagtcatgataaccaacgaagaagaaattaaaactactaacccggtagcaacggagtcctatggacaagtggccacaaaccaccagagtgcccaagcacaggcgcagaccggctgggttcaaaaccaaggaatacttccgggtatggtttggcaggacagagatgtgtacctgcaaggacccatttgggccaaaattcctcacacggacggcaactttcacccttctccgctgatgggagggtttggaatgaagcacccgcctcctcagatcctcatcaaaaacacacctgtacctgcggatcctccaacggccttcaacaaggacaagctgaactctttcatcacccagtattctactggccaagtcagcgtggagatcgagtgggagctgcagaaggaaaacagcaagcgctggaacccggagatccagtacacttccaactattacaagtctaataatgttgaatttgctgttaatactgaaggtgtatatagtgaaccccgccccattggcaccagatacctgactcgtaatctg

SEQ ID NO: 653 - DNA, 2208 bp, Artificial Sequence
  source: /note="Description of Artificial Sequence: Synthetic polynucleotide"
  modified_base (377)..(377): a, c, g, or t
atggctgccgatggttatcttccagattggctcgaggacaaccttagtgaaggaattcgcgagaggtgggctttgaaacctggagcccctcaacccaaggcaaatcaacaacatcaagacaacgctcgaggtcttgtgcttccgggttacaaataccttggacccggcaacggactcgacaagggggagccggtcaacgcagcagacgcggcggccctcgagcacgacaaggcctacgaccagcagctcaaggccggagacaacccgtacctcaagtacaaccacgccgacgccgagttccaggagcggctcaaagaagatacgtcttttgggggcaacctcgggcgagcagtcttccaggccaaaaagaggcttcntgaacctcttggtctggttgaggaagcggctaagacggctcctggaaagaagaggcctgtagagcagtctcctcaggaaccggactcctccgcgggtattggcaaatcgggtgcacagcccgctaaaaagagactcaatttcggtcagactggcgacacagagtcagtcccagaccctcaaccaatcggagaacctcccgcagccccctcaggtgtgggatctcttacaatggcttcaggtggtggcgcaccagtggcagacaataacgaaggtgccgatggagtgggtagttcctcggggaattggcattgcgattcccaatggctgggggacagagtcatcaccaccagcacccgaacctgggccctgcccacctacaacaatcacctctacaagcaaatctccaacagcacatctggaggatcttcaaatgacaacgcctacttcggctacagcaccccctgggggtattttgacttcaacagattccactgccacttctcaccacgtgactggcagcgactcatcaacaacaactggggattccggcctaagcgactcaacttcaagctcttcaacattcaggtcaaagaggttacggacaacaatggagtcaagaccatcgccaataaccttaccagcacggtccaggtcttcacggactcagactatcagctcccgtacgtgctcgggtcggctcacgagggctgcctcccgccgttcccagcggacgttttcatgattcctcagtacgggtatctgacgcttaatgatggaagccaggccgtgggtcgttcgtccttttactgcctggaatatttcccgtcgcaaatgctaagaacgggtaacaacttccagttcagctacgagtttgagaacgtacctttccatagcagctacgctcacagccaaagcccggaccgactaatgaatccactcatcgaccaatacttgtactatctctcaaagactattaacggttctggacagaatcaacaaacgctaaaattcagtgtggccggacccagcaacatggctgtccagggaagaaactacatacctggacccagctaccgacaacaacgtgtctcaaccactgtgactcaaaacaacaacagcgaatttgcttggcctggagcttcttcttgggctctcaatggacgtaatagcttgatgaatcctggacctgctatggccagccacaaagaaggagaggaccgtttctttcctttgtctggatctttaatttttggcaaacaaggaactggaagagacaacgtggatgcggacaaagtcatgataaccaacgaagaagaaattaaaactactaacccggtagcaacggagtcctatggacaagtggccacaaaccaccagagtgcccaagcacaggcgcagaccggctgggttcaaaaccaaggaatacttccgggtatggtttggcaggacagagatgtgtacctgcaaggacccatttgggccaaaattcctcacacggacggcaactttcacccttctccgctgatgggagggtttggagtgaagcacccgcctcctcagatcctcatcaaaaacacacctgtacctgcggatcctccaacggccttcaacaaggacaagctgaactctttcatcacccagtattctactggccaagtcagcgtggagatcgagtgggagctgcagaaggaaaacagcaagcgctggaacccggagatccagtacacttccaactattacaagtctaataatgttgaatttgctgttaatactgaaggtgtatatagtgaaccccgccccattggcaccagatacctgactcgtaatctg

SEQ ID NO: 654 - DNA, 2208 bp, Artificial Sequence
  source: /note="Description of Artificial Sequence: Synthetic polynucleotide"
atggctgccgatggttatcttccagattggctcgaggacaaccttagtgaaggaattcgcgagtggtgggctttgaaacctggagcccctcaacccaaggcaaatcaacaacatcaagacaacgctcgaggtcttgtgcttccgggttacaaataccttggacccggcaacggactcgacaagggggagccggtcaacgcagcagacgcggcggccctcgagcacgacaaggcctacgaccagcagctcaaggccggagacaacccgtacctcaagtacaaccacgccgacgccgagttccaggagcggctcaaagaagatacgtcttttgggggcaacctcgggcgagcagtcttccaggccaaaaagaggcttcttgaacctcttggtctggttgaggaagcggctaagacggctcctggaaagaagaggcctgtagagcagtctcctcaggaaccggactcctccgcgggtattggcaaatcgggtgcacagcccgctaaaaagagactcaatttcggtcagactggcgacacagagtcagtcccagaccctcaaccaatcggagaacctcccgcagccccctcaggtgtgggatctcttacaatggcttcaggtggtggcgcaccagtggcagacaataacgaaggtgccgatggagtgggtagttcctcgggaaattggcattgcgattcccaatggctgggggacagagtcatcaccaccagcacccgaacctgggccctgcccacctacaacaatcacctctacaagcaaatctccaacagcacatctggaggatcttcaaatgacaacgcctacctcggctacagcaccccctgggggtattttgacttcaacagattccactgccacttctcaccacgtgactggcagcgactcatcaacaacaactggggattccggcctaagcgactcaacttcaagctcttcaacattcaggtcaaagaggttacggacaacaatggagtcaagaccatcgccaataaccttaccagcacggtccaggtcttcacggactcagactatcagctcccgtacgtgctcgggtcggctcacgagggctgcctcccgccgttcccagcggacgttttcatgattcctcagtacgggtatctgacgcttaatgatggaagccaggccgtgggtcgttcgtccttttactgcctggaatatttcccgtcgcaaatgctaagaacgggtaacaacttccagttcagctacgagtttgagaacgtacctttccatagcagctacgctcacagccaaagcctggaccgactaatgaatccactcatcgaccaatacttgtactatctctcaaagactattaacggttctggacagaatcaacaaacgctaaaattcagtgtggccggacccagcaacatggctgtccagggaagaaactacatacctggacccagctaccgacaacaacgtgtctcaaccactgtgactcaaaacaacaacagcgaatttgcttggcctggagcttcttcttgggctctcaatggacgtaatagcttgatgaatcctggacctgctatggccagccacaaagaaggagaggaccgtttctttcctttgtctggatctttaatttttggcaaacaaggaactggaagagacaacgtggatgcggacaaagtcatgataaccaacgaagaagaaattaaaactactaacccggtagcaacggagtcctatggacaagtggccacaaaccaccagagtgcccaagcacaggcgcagaccggctgggttcaaaaccaaggaatacttccgggtatggtttggcaggacagagatgtgtacctgcaaggacccatttgggccaaaattcctcacacggacggcaactttcacccttctccgctgatgggagggtttggaatgaagcacccgcctcctcagatcctcatcaaaaacacacctgtacctgcggatcctccaacggccttcaacaaggacaagctgaactctttcatcacccagtattctactggccaagtcagcgtggagatcgagtgggagctgcagaaggaaaacagcaagcgctggaacccggagatccagtacacttccaactattacaagtctaataatgttgaatttgctgttaatactgaaggtgtatatagtgaaccccgccccattggcaccagatacctgactcgtaatctg

SEQ ID NO: 655 - DNA, 2208 bp, Artificial Sequence
  source: /note="Description of Artificial Sequence: Synthetic polynucleotide"
atggctgccgatggttatcttccagattggctcgaggacaaccttagtgaaggaattcgcgagtggtgggctttgaaacctggagcccctcaacccaaggcaaatcaacaacatcaagacaacgctcgaggtcttgtgcttccgggttacaaataccttggacccggcaacggactcgacaagggggagccggtcaacgcagcagacgcggcggccctcgagcacgacaaggcctacgaccagcagctcaaggccggagacaacccgtacctcaagtacaaccacgccgacgccgagttccaggagcggctcaaagaagatacgtcttttgggggcaacctcgggcgagcagtcttccaggccaaaaagaggcttcttgaacctcttggtctggttgaggaagcggctaagacggctcctggaaagaagaggcctgtagagcagtctcctcaggaaccggactcctccgcgggtattggcaaatcgggtgcacagcccgctaaaaagagactcaatttcggtcagactggcgacacagagtcagtcccagaccctcaaccaatcggagaacctcccgcagccccctcaggtgtgggatctcttacaatggcttcaggtggtggcgcaccagtggcagacaataacgaaggtgccgatggagtgggtagttcctcgggaaattggcattgcgattcccaatggctgggggacagagtcatcaccaccagcacccgaacctgggccctgcccacctacaacaatcacctctacaagcaaatctccaacagcacatctggaggatcttcaaatgacaacgcctacttcggctacagcaccccctgggggtattttgacttcaacagattccactgccacttctcaccacgtgactggcagcgactcatcaacaacaactggggattccggcctaagcgactcaacttcaagctcttcaacattcaggtcaaagaggttacggacaacaatggagtcaagaccatcgccaataaccttaccagcacggtccaggtcttcacggactcagactatcagctcccgtacgtgctcgggtcggctcacgagggctgcctcccgccgttcccagcggacgttttcatgattcctcagtacgggtatctgacgcttaatgatggaagccaggccgtgggtcgttcgtccttttactgcctggaatatttcccgtcgcaaatgctaagaacgggtaacaacttccagttcagctacgagtttgagaacgtacctttccatagcagctacgctcacagccagagcctggaccgactaatgaatccactcatcgaccaatacttgtactatctctcaaagactattaacggttctggacagaatcaacaaacgctaaaattcagtgtggccggacccagcaacatggctgtccagggaagaaactacatacctggacccagctaccgacaacaacgtgtctcaaccactgtgactcaaaacaacaacagcgaatttgcttggcctggagcttcttcttgggctctcaatggacgtaatagcttgatgaatcctggacctgctatggccagccacaaagaaggagaggaccgtttctttcctttgtctggatctttaatttttggcaaacaaggaactggaagagacaacgtggatgcggacaaagtcatgataaccaacgaagaagaaattaaaactactaacccggtagcaacggagtcctatggacaagtggccacaaaccaccagagtgcccaagcacaggcgcagaccggctgggttcaaaaccaaggaatacttccgggtatggtttggcaggacagagatgtgtacctgcaaggacccatttgggccaaaattcctcacacggacggcaactttcacccttctccgctgatgggagggtttggaatgaagcacccgcctcctcagatcctcatcaaaaacacacctgtacctgcggatcctccaacggccttcaacaaggacaagctggactctttcatcacccagtattctactggccaagtcagcgtggagatcgagtgggagctgcagaaggaaaacagcaagcgctggaacccggtgatccagtacacttccaactattacaagtctaataatgttgaatttgctgttaatactgaaggtgtatatagtgaaccccgccccattggcaccagatacctgactcgtaatctg

SEQ ID NO: 656 - DNA, 2208 bp, Artificial Sequence
  source: /note="Description of Artificial Sequence: Synthetic polynucleotide"
atggctgccgatggttatcttccagattggctcgaggacaacctctctgagggcattcgcgagtggtgggacttgaaacctggagccccgaagcccaaagccaaccagcaaaagcaggacgacggccggggtctggtgcttcctggctacaagtacctcggacccttcaacggactcgacaagggggagcccgtcaacgcggcggacgcagcggccctcgagcacgacaaggcctacgaccagcagctcaaagcgggtgacaatccgtacctgcggtataaccacgccgacgccgagtttcaggagcgtctgcaagaagatacgtcttttgggggcaacctcgggcgagcagtcttccaggccaagaagcgggttctcgaacctctcggtctggttgaggaaggcgctaagacggctcctggaaagaaacgtccggtagagcagtcgccacaagagccagactcctcctcgggcatcggcaagacaggccagcagcccgctaaaaagagactcaattttggtcagactggcgactcagagtcagtccccgatccacaacctctcggagaacctccagcaacccccgctgctgtggggcctactacaatggcttcaggcggtggcgcaccaatggcagacaataacgaaggcgtcgacggagtgggtaatgcctcaggaaattggcattgcgattccacatggctgggcgacagagtcatcaccaccagcacccgcacctgggccttgcccacctacaataaccacctctacaagcaaatctccagtgcttcaacgggggccagcaacgacaaccactacttcggctacagcaccccctgggggtattttgatttcaacagattccactgccacttttcaccacgtgactggcagcgactcatcaacaacaattggggattccggcccaagagactcaacttcaaactcttcaacatccaagtcaaggaggtcacgacgaatgatggcgttacaaccatcgctaataaccttaccagcacggttcaagtcttctcggactcggagtaccagcttccgtacgtcctcggctctgcgcaccagggctgcctccctccgttcccggcggacgtgttcatgattccgcaatacggctacctgacgctcaacaatggcagccaagccgtgggacgttcatccttttactgcctggaatatttcccttctcagatgctgagaacgggcaacaactttaccttcagctacacctttgaggaagtgcctttccacagcagctacgcgcacagccagagcctggaccggctgatgaatcctctcatcgaccaatacctgtattacctgaacagaactcaaaatcagtccggaagtgcccaaaacaaggacttgctgtttagccgtgggtctccagctggcatgtctgttcagcccaaaaactggctacctggaccctgttatcggcagcagcgcgtttctaaaacaaaaacagacaacaacaacagcaattttacctggactggtgcttcaaaatataacctcaatgggcgtgaatccatcatcaaccctggcactgctatggcctcacacaaagacgacgaagacaagttctttcccatgagcggtgtcatgatttttggaaaagagagcgccggagcttcaaacactgcattggacaatgtcatgattacagacgaagaggaaattaaagccactaaccctgtggccaccgaaagatttgggaccgtggcagtcaatttccagagcagcagcacagaccctgcgaccggagatgtgcatgctatgggagcattacctggcatggtgtggcaagatagagacgtgtacctgcagggtcccatttgggccaaaattcctcacacagatggacactttcacccgtctcctcttatgggcggctttggactcaagaacccgcctcctcagatcctcatcaaaaacacgcctgttcctgcgaatcctccggcggagttttcagccacaaagcttgcttcattcatcacccaatactccacaggacaagtgagtgtggaaattgaatgggagctgcagaaagaaaacagcaagcgctggaatcccgaagtgcagtacacatccaattatgcaaaatctgccaacgttgattttactgtggacaacaatggactttatactgagcctcgccccattggcacccgttaccttacccgtcccctg

SEQ ID NO: 657 - DNA, 2208 bp, Artificial Sequence
  source: /note="Description of Artificial Sequence: Synthetic polynucleotide"
atggctgccgatggttatcttccagattggctcgaggacaacctctctgagggcattcgcgagtggtgggacttgaaacctggagccccgaagcccaaagccaaccagcaaaagcaggacgacggccggggtctggtgcttcctggctacaagtacctcggacccttcaacggactcgacaagggggagcccgtcaacgcggcggacgcagcggccctcgagcacgacaaggcctacgaccagcagctcaaagcgggtgacaatccgtacctgcggtataaccacgccgacgccgagtttcaggagcgtctgcaagaagatacgtcttttgggggcaacctcgggcgagcagtcttccaggccaagaagcgggttctcgaacctctcggtctggttgaggaaggcgctaagacggctcctggaaagagacgtccggtagagcagtcgccacaagagccagactcctcctcgggcatcggcaagacaggccagcagcccgctaaaaagagactcaattttggtcagactggcgactcagagtcagtccccgatccacaacctctcggagaacctccagcaacccccgctgctgtgggacctactacaatggcttcaggcggtggcgcaccaatggcagacaataacgaaggcgccgacggagtgggtaatgcctcaggaaattggcattgcgattccacatggctgggcgacagagtcatcaccaccagcacccgcacctgggccttgcccacctacaataaccacctctacaagcaaatctccagtgcttcaacgggggccagcaacgacaaccactacttcggctacagcaccccctgggggtattttgatttcaacagattccactgccacttttcaccacgtgactggcagcgactcatcaacaacaattggggattccggcccaagagactcaacttcaaactcttcaacatccaagtcaaggaggtcacgacgaatgatggcgtcacaaccatcgctaataaccttaccagcacggttcaagtcttctcggactcggagtaccagcttccgtacgtcctcggctctgcgcaccagggctgcctccctccgttcccggcggacgtgttcatgattccgcaatacggctacctgacgctcaacaatggcagccaagccgtgggacgttcatccttttactgcctggaatatttcccttctcagatgctgagaacgggcaacaactttaccttcagctacacctttgaggaagtgcctttccacagcagctacgcgcacagccagagcctggaccggctgatgaatcctctcatcgaccaatacctgtattacctgaacagaactcaaaatcagtccggaagtgcccaaaacaaggacttgctgtttagccgtgggtctccagctggcatgtctgttcagcccaaaaactggctacctggaccctgttatcggcagcagcgcgtttctaaaacaaaaacagacaacaacaacagcaattttacctggactggtgcttcaaaatataacctcaatgggcgtgaatccatcatcaaccctggcactgctatggcctcacacaaagacgacgaagacaagttctttcccatgagcggtgtcatgatttttggaaaagagagcgccggagcttcaaacactgcattggacaatgtcatgattacagacgaagaggaaattaaagccactaaccctgtggccaccgaaagatttgggaccgtggcagtcaatttccagagcagcagcacagaccctgcgaccggagatgtgcatgctatgggagcattacctggcatggtgtggcaagatagagacgtgtacctgcagggtcccatttgggccaaaattcctcacacagatggacactttcacccgtctcctcttatgggcggctttggactcaagaacccgcctcctcagatcctcatcaaaaacacgcctgttcctgcgaatcctccggcggagttttcagctacaaagtttgcttcgttcatcacccaatactccacaggacaagtgagtgtggaaattgaatgggagctgcagaaagaaaacagcaagcgctggaatcccgaagtgcagtacacatccaattatgcaaaatctgccaacgttgattttactgtggacaacaatggactttatactgagcctcgccccattggcacccgttaccttacccgtcccctg

SEQ ID NO: 658 - DNA, 2208 bp, Artificial Sequence
  source: /note="Description of Artificial Sequence: Synthetic polynucleotide"
atggctgccgatggttatcttccagattggctcgaggacaacctctctgagggcattcgcgagtggtgggacttgaaacctggagccccgaagcccaaagccaaccagcaaaagcaggacgacggccggggtctggtgcttcctggctacaagtacctcggacccttcaacggactcgacaagggggagcccgtcaacgcggcggacgcagcggccctcgagcacgacaaggcctacgaccagcagctcaaagcgggtgacaatccgtacccgcggtataaccacgccgacgccgagtttcaggagcgtctgcaagaagatacgtcttttgggggcaacctcgggcgagcagtcttccaggccaagaagcgggttctcgaacctctcggtctggttggggaaggcgctaagacggctcctggaaagaaacgtccggtagagcagtcgccacaagagccagactcctcctcgggcatcggcaagacaggccagcagcccgctaaaaagagactcaattttggtcagactggcgactcagagtcagtccccgatccacaacctctcggagaacctccagcaacccccgctgctgtgggacctactacaatggcttcaggcggtggcgcaccaatggcagacaataacgaaggcgccgacggagtgggtaatgcctcaggaaattggcattgcgattccacatggctgggcgacagagtcatcaccaccagcacccgcacctgggccttgcccacctacaataaccacctctacaagcaaatctccagtgcttcaacgggggccagcaacgacaaccactacttcggctacagcaccccctgggggtattttgatttcaacagattccactgccacttttcaccacgtgactggcagcgactcatcaacaacaattggggattccggcccaagagactcaacttcaaactcttcaacatccaagtcaaggaggtcacgacgaatgatggcgtcacaaccatcgctaataaccttaccagcacggttcaagtcttctcggactcggagtaccagcttccgtacgtcctcggctctgcgcaccagggctgcctccctccgttcccggcggacgtgttcatgattccgcaatacggctacctgacgctcaacaatggcagccaagccgtgggacgttcatccttttactgcctggaatatttcccttctcagatgctgagaacgggcaacaactttaccttcagctacacctttgaggaagtgcctttccacagcagctacgcgcacagccagagcctggaccggctgatgaatcctcccatcgaccaatacctgtattacctgaacagaactcaaaatcagtccggaagtgcccaaaacaaggacttgctgtttagccgtgggtctccagctggcatgtctgttcagcccaaaaactggctacctggaccctgttatcggcagcagcgcgtttctaaaacaaaaacagacaacaacaacagcaattttacctggactggtgcttcaaaatataacctcaatgggcgtgaatccatcatcaaccctggcactgctatggcctcacacaaagacgacgaagacaagttctttcccatgagcggtgtcatgatttttggaaaagagagcgccggagcttcaaacactgcattggacaatgtcatgattacagacgaagaggaaattaaagccactaaccctgtggccaccgaaagatttgggaccgtggcagtcaatttccagagcagcagcacagaccctgcgaccggagatgtgcatgctatgggagcattacctggcatggtgtggcaagatagagacgtgtacctgcagggtcccatttgggccaaaattcctcacacagatggacactttcacccgtctcctcttatgggcggctttggactcaagaacccgcctcctcagatcctcatcaaaaacacgcctgttcctgcgaatcctccggcggagttttcagctacaaagtttgcttcattcatcacccaatactccacaggacaagtgagtgtggaaattgaatgggagctgcagaaagaaaacagcaagcgctggaatcccgaagtgcagtacacatccaattatgcaaaatctgccaacgttgattttactgtggacaacaatggactttatactgagcctcgccccattggcacccgttaccttacccgtcccctg

SEQ ID NO: 659 - DNA, 2208 bp, Artificial Sequence
  source: /note="Description of Artificial Sequence: Synthetic polynucleotide"
atggctgccgatggttatcttccagattggctcgaggacaacctctctgagggcattcgcgagtggtgggacttgaaacctggagccccgaagcccaaagccaaccagcaaaagcaggacgacggccggggtctggtgcttcctggctacaagtacctcggacccttcaacggactcgacaagggggagcccgtcaacgcggcggacgcagcggccctcgagcacgacaaggcctacgaccagcagctcaaagcgggtgacaatccgtacctgcggtataaccacgccgacgccgagtttcaggagcgtctgcaagaagatacgtcttttgggggcaacctcgggcgagcagtcttccaggccaagaagcgggttctcgaacctctcggtctggttgaggaaggcgctaagacggctcctggaaagaaacgtccggtagagcagtcgccacaagagccagactcctcctcgggcatcggcaagacaggccagcagcccgctaaaaagagactcaattttggtcagactggcgactcagagtcagtccccgatccacgacctctcggagaacctccagcaacccccgctgctgtgggacctactacaatggcttcaggcggtggcgcaccaatggcagacaataacgaaggcgccgacggagtgggtaatgcctcaggaaattggcattgcgattccacatggctgggcgacagagtcatcaccaccagcacccgcacctgggccttgcccacctacaataaccacctctacaagcaaatctccagtgcttcaacgggggccagcaacgacaaccactacttcggctacagcaccccctgggggtattttgatttcaacagattccactgccacttttcaccacgcgactggcagcgactcatcaacaacaattggggattccggcccaagagactcaacttcaaactcttcaacatccaagtcaaggaggtcacgacgaatgatggcgtcacaaccatcgctaataaccttaccagcacggttcaagtcttctcggactcggagtaccagcttccgtacgtcctcggctctgcgcaccagggctgcctccctccgttcccggcggacgtgttcatgattccgcaatacggctacctgacgctcaacaatggcagccaagccgtgggacgttcatccttttactgcctggaatatttcccttctcagatgctgagaacgggcaacaactttaccttcagctacacctttgaggaagtgcctttccacagcagctacgcgcacagccagagcctggaccggctgatgaatcctctcatcgaccaatacctgtattacctgaacagaactcaaaatcagtccggaagtgcccaaaacaaggacttgctgtttagccgtgggcctccagctggcatgtctgttcagcccaaaaactggctacctggaccctgttatcggcagcagcgcgtttctaaaacaaaaacagacaacaacaacagcaattttacctggactggtgcttcaaaatataacctcaatgggcgtgaatccatcatcaaccctggcactgctatggcctcacacaaagacgacgaagacaagttctttcccatgagcggtgtcatgatttttggaaaagagagcgccggagcttcaaacactgcattggacaatgtcatgattacggacgaagaggaaattaaagccactaaccctgtggccaccgaaagatttgggaccgtggcagtcaatttccagagcagcagcacagaccctgcgaccggagatgtgcatgctatgggagcattacctggcatggtgtggcaagatagagacgtgtacctgcagggtcccatttgggccaaaattcctcacacagatggacactttcacccgtctcctcttatgggcggctttggactcaagaacccgcctcctcagatcctcatcaaaaacacgcctgttcctgcgaatcctccggcggagttttcagctacaaagtttgcttcattcatcacccaatactccacaggacaagtgagtgtggaaattgaatgggagctgcagaaagaaaacagcaagcgctggaatcccgaagtgcagtacacatccaattatgcaaaatctgccaacgttgattttactgtggacaacaatggactttatactgagcctcgccccattggcacccgttaccttacccgtcccctg

SEQ ID NO: 660 - DNA, 2208 bp, Artificial Sequence
  source: /note="Description of Artificial Sequence: Synthetic polynucleotide"
atggctgccgatggttatcttccagattggctcgaggacaacctctctgagggcattcgcgagtggtgggacttgaaacctggagccccgaagcccaaagccaaccagcaaaagcaggacgacggccggggtctggtgcttcctggctacaagtacctcggacccttcaacggactcgacaagggggagcccgtcaacgcggcggacgcagcggccctcgagcacgacaaggcctacgaccagcagctcaaagcgggtgacaatccgtacctgcggtataaccacgccgacgccgagtttcaggagcgtctgcaagaagatacgtcttttgggggcaacctcgggcgagcagtcttccaggccaagaagcgggttctcgaacctctcggtctggttgaggaaggcgctaagacggctcctggaaagaaacgtccggtagagcagtcgccacaagagccagactcctcctcgggcatcggcaagacaggccagcagcccgctaaaaagagactcaattttggtcagactggcggctcagagtcagtccccgatccacaacctctcggagaacctccagcaacccccgctgctgtgggacctactacaatggcttcaggcggtggcgcaccaatggcagacaataacgaaggcgccgacggagtgggtaatgcctcaggaaattggcattgcgattccacatggctgggcgacagagtcatcaccaccagcacccgcacctgggccttgcccacctacaataaccacctctacaagcaaatctccagtgcttcaacgggggccagcaacgacaaccactacttcggctacagcaccccctgggggtattttgatttcaacagattccactgccacttttcaccacgtgactggcagcgactcatcaacaacaattggggattccggcccaagagactcaacttcaaactcttcaacatccaagtcaaggaggtcacgacgaatgatggcgtcacaaccatcgctaataaccttaccagcacggttcaagtcttctcggactcggagtaccagcttccgtacgtcctcggctctgcgcaccagggctgcctccctccgttcccggcggacgtgttcatgattccgcaatacggctacctgacgctcaacaatggcagccaagccgtgggacgttcatccttttactgcctggaatatttcccttctcagatgctgagaacgggcaacaactttaccttcagctacacctttgaggaagtgcctttccacagcagctacgcgcacagccagagcctggaccggctgatgaatcctcccatcgaccaatacctgtattacctgaacagaactcaaaatcagtccgggagtgcccaaaacaaggacttgctgtttagccgtgggtctccagctggcatgtctgttcagcccaaaaactggctacctggaccctgttatcggcagcagcgcgtttctaaaacaaaaacagacaacaacaacagcaattttacctggactggtgcttcaaaatataacctcaatgggcgtgaatccatcatcaaccctggcactgctatggcctcacacaaagacgacgaagacaagttctttcccatgagcggtgtcatgatttttggaaaagagagcgccggagcttcaaacactgcattggacaatgtcatgattacagacgaagaggaaattaaagccactaaccctgtggccaccgaaagatttgggaccgtggcagtcaatttccagagcagcagcacagaccctgcgaccggagatgtgcatgctatgggagcattacctggcatggtgtggcaagatagagacgtgtacctgcagggtcccatttgggccaaaattcctcacacagatggacactttcacccgtctcctcttatgggcggctttggactcaagaacccgcctcctcagatcctcatcaaaaacacgcctgttcctgcgaatcctccggcggagttttcagctacaaagtttgcttcattcatcacccaatactccacaggacaagtgagtgtggaaattgaatgggagctgcagaaagaaaacagcaagcgctggaatcccgaagtgcagtacacatccaattatgcaaaatctgccaacgttgactttactgtggacaacaatggactttatactgagcctcgccccattggcacccgttaccttacccgtcccctg

SEQ ID NO: 661 - DNA, 2208 bp, Artificial Sequence
  source: /note="Description of Artificial Sequence: Synthetic polynucleotide"
atggctgccgatggttatcttccagattggctcgaggacaacctctctgagggcattcgcgagtggtgggacttgaaacctggagccccgaagcccaaagccaaccagcaaaagcaggacgacggccggggtctggtgcttcctggctacaagtacctcggacccttcaacggactcgacaagggggagcccgtcaacgcggcggacgcagcggccctcgagcacgacaaggcctacgaccagcagctcaaagcgggtgacaatccgtacctgcggtataaccacgccgacgccgagtttcaagagcgtctgcaagaagatacgtcttttgggggcaacctcgggcgagcagtcttccaggccaagaagcgggttctcgaacctctcggtctggttgaggaaggcgctaagacggctcctggaaagaaacgtccggtagagcagtcgccacaagagccagactcctcctcgggcatcggcaagacaggccagcagcccgctaaaaagagactcaattttggtcagactggcgactcagagtcagtccccgatccgcaacctctcggagaacctccagcaacccccgctgctgtgggacctactacaatggcttcaggcggtggcgcaccaatggcagacaataacgaaggcgccgacggagtgggtaatgcctcaggaaattggcattgcgattccacatggctgggcgacagagtcatcaccaccagcacccgcacctgggccttgcccacctacaataaccacctctacaagcaaatctccagtgcttcaacgggggccagcaacgacaaccactacttcggctacagcaccccctgggggtattttgatttcaacagattccactgccacttttcaccacgtgactggcagcgactcatcaacaacaattggggattccggcccaagagactcaacttcaaactcttcaacatccaagtcaaggaggtcacgacgaatgatggcgtcacaaccatcgctaataaccttaccagcacggttcaagtcttctcggactcggagtaccagcttccgtacgtcctcggctctgcgcaccagggctgcctccctccgttcccggcggacgtgttcatgattccgcaatacggctacctgacgctcaacaatggcagccaagccgtgggacgttcatccttttactgcctggaatatttcccttctcagatgctgagaacgggcaacaactttaccttcagctacacctttgaggaagtgcctttccacagcagctacgcgcacagccagagcctggaccggctgatgaatcctctcatcgaccaatacctgtattacctgaacagaactcaaaatcagtccggaagtgcccaaaacaaggacttgctgtttagccgtgggtctccagctggcatgtctgttcagcccaaaaactggctacctggaccctgttatcggcagcagcgcgtttctaaaacaaaaacagacaacaacaacagcaattttacctggactggtgcttcaaaatataacctcaatgggcgtgaatccatcatcaaccctggcactgctgtggcctcacacaaagacgacgaagacaagttctttcccatgagcggtgtcatgatttttggaaaagagagcgccggagcttcaaacactgcattggacaatgtcatgattacagacgaagaggaaattaaagccactaaccctgtggccaccgaaagatttgggaccgtggcagtcaatttccagagcagcagcacagaccctgcgaccggagatgtgcatgctatgggagcattacctggcatggtgtggcaagatagagacgtgtacctgcagggtcccatttgggccaaaattcctcacacagatggacactttcacccgtctcctcttatgggcggctttggactcaagaacccgcctcctcagatcctcatcaaaaacacgcctgttcctgcgaatcctccggcggagttttcagctacaaagtttgcttcattcatcacccaatactccacaggacaagtgagtgtggaaattgaatgggagctgcagaaagaaaacagcaagcgctggaatcccgaagtgcagtacacatccaattatgcaaaatctgccaacgttgattttactgtggacaacaatggactttatactgagcctcgccccattggcacccgttaccttacccgtcccctg

SEQ ID NO: 662 - DNA, 2208 bp, Artificial Sequence
  source: /note="Description of Artificial Sequence: Synthetic polynucleotide"
atggctgccgatggttatcttccagattggctcgaggacaacctctctgagggcattcgcgagtggtgggacttgaaacctggagccccgaagcccaaagccaaccagcaaaagcaggacgacggccggggtctggtgcttcctggctacaagtacctcggacccttcaacggactcgacaagggggagcccgtcaacgcggcggacgcagcggccctcgagcacgacaaggcctacgaccagcagctcaaagcgggtgacaatccgtacctgcggtataaccacgccgacgccgagtttcaggagcgtctgcaagaagatacgtcttttgggggcaacctcgggcgagcagtcttccaggccaagaagcgggttctcgaacctctcggtctggttgaggaaggcgctaagacggctcctggaaagaaacgtccggtagagcagtcgccacaagagccagactcctcctcgggcatcggcaagacaggccagcagcccgctaaaaagagactcaattttggtcagactggcgactcagagtcagtccccgatccacaacctctcggagaacctccagcaacccccgctgctgtgggacctactacaatggcttcaggcggtggcgcaccaatggcagacaataacgaaggcgccgacggagtgggtaatgcctcaggaaattggcattgcgattccacatggctgggcgacagagtcatcaccaccagcacccgcacctgggccttgcccacctacaataaccacctctacaagcaaatctccagtgcttcaacgggggccagcaacgacaaccactacttcggctacagcaccccctgggggtattttgatttcaacagattccactgccacttttcaccacgtgactggcagcaactcatcaacaacaattggggattccggcccaagagactcaacttcaaactcttcaacatccaagtcaaggaggtcacgacgaatgatggcgtcacaaccatcgctaataaccttaccagcacggttcaagtcttctcggactcggagtaccagcttccgtacgtcctcggctctgcgcaccagggctgcctccctccgttcccggcggacgtgttcatgattccgcaatacggctacctgacgctcaacaatggcagccaagccgtgggacgttcatccttttactgcctggaatatttcccttctcagatgctgagaacgggcaacaactttaccttcagctacacctttgaggaagtgcctttccacagcagctacgcgcacagccagagcctggaccggctgatgaatcctctcatcgaccaatacctgtattacctgaacagaactcaaaatcagtccggaagtgcccaaaacaaggacttgctgtttagccgtgggtctccagctggcatgtctgttcagcccaaaaactggctacctggaccctgttatcggcagcagcgcgtttctaaaacaaaaacagacaacaacaacagcaattttacctggactggtgcttcaaaatataacctcaatgggcgtgaatccatcatcaaccctggcactgctatggcctcacacaaagacgacgaagacaagttctttcccatgagcggtgtcatgatttttggaaaagagagcgccggagcttcaaacactgcattggacaatgtcatgattacagacgaagaggaaattaaagccactaaccctgtggccaccgaaagatttgggaccgtggcagtcaatttccagagcaccagcacagaccctgcgaccggagatgtgcatgctatgggagcattacctggcatggtgtggcaagatagagacgtgtacctgcagggtcccatttgggccaaaattcctcacacagatggacactttcacccgtctcctcttatgggcggctttggactcaagaacccgcctcctcagatcctcatcaaaaacacgcctgttcctgcgaatcctccggcggagttttcagctacaaagtttgcttcattcatcacccaatactccacaggacaagtgagtgtggaaattgaatgggagctgcagaaagaaaacagcaagcgctggaatcccgaagtgcagtacacatccaattatgcaaaatctgccgacgttgattttactgtggacaacaatggactttatactgagcctcgccccattggcacccgttaccttacccgtcccctg

SEQ ID NO: 663 - DNA, 2208 bp, Artificial Sequence
  source: /note="Description of Artificial Sequence: Synthetic polynucleotide"
atggctgccgatggttatcttccagattggctcgaggacaacctctctgagggcattcgcgagtggtgggacttgaaacctggagccccgaagcccaaagccaaccagcaaaagcaggacgacggccggggtctggtgcttcctggctacaagtacctcggacccttcaacggactcgacaagggggagcccgtcaacgcggcggacgcagcggccctcgagcacgacaaggcctacgaccagcagctcaaagcgggtgacaatccgtacctgcggtataaccacgccgacgccgagtttcaagagcgtctgcaagaagatacgtcttttgggggcaacctcgggcgagcagtcttccaggccaagaagcgggttctcgaacctctcggtctggttgaggaaggcgctaagacggctcctggaaagaaacgtccggtagagcagtcgccacaagagccagactcctcctcgggcatcggcaagacaggccagcagcccgctaaaaagagactcaattttggtcagactggcgactcagagtcagtccccgatccgcaacctctcggagaacctccagcaacccccgctgctgtgggacctactacaatggcttcaggcggtggcgcaccaatggcagacaataacgaaggcgccgacggagtgggtaatgcctcaggaaattggcattgcgattccacatggctgggcgacagagtcatcaccaccagcacccgcacctgggccttgcccacctacaataaccacctctacaagcaaatctccagtgcttcaacgggggccagcaacgacaaccactacttcggctacagcaccccctgggggtattttgatttcaacagattccactgccacttttcaccacgtgactggcagcgactcatcaacaacaattggggattccggcccaagagactcaacttcaaactcttcaacatccaagtcaaggaggtcacgacgaatgatggcgtcacaaccatcgctaataaccttaccagcacggttcaagtcttctcggactcggagtaccagcctccgtacgtcctcggctctgcgcaccagggctgcctccctccgttcccggcggacgtgttcatgattccgcaatacggccacctgacgctcaacaatggcagccaagccgtgggacgttcatccttttactgcctggaatatttcccttctcagatgctgagaacgggcaacaactttaccttcagctacacctttgaggaagtgcctttccacagcagctacgcgcacagccagagcctggaccggctgacgaatcctctcatcgaccaatacctgtattacctgaacagaactcaaaatcagtccggaagtgcccaaaacaaggacttgctgtttagccgtgggtctccagctggcatgtctgttcagcccaaaaactggctacctggaccctgttatcggcagcagcgcgtttctaaaacaaaaacagacaacaacaacagcaattttacctggactggtgcttcaaaatataacctcaatgggcgtgaatccatcatcaaccctggcactgctatggcctcacacaaagacgacgaagacaagttctttcccatgagcggtgtcatgatttttggaaaagagagcgccggagcttcaaacactgcattggacaatgtcatgattacagacgaagaggaaattaaagccactaaccctgtggccaccgaaagatttgggaccgtggcagtcaatttccagagcagcagcacagaccctgcgaccggagatgtgcatgctatgggagcattacctggcatggtgtggcaagatagagacgtgtacctgcagggtcccatttgggccaaaattcctcacacagatggacactttcacccgtctcctcttatgggcggctttggactcaagaacccgcctcctcagatcctcatcaaaaacacgcctgttcctgcgaatcctccggcggagttttcagctacaaagtttgcttcattcatcacccaatactccacaggacaagtgagtgtggaaattgaatgggagctgcagaaagaaaacagcaagcgctggaatcccgaagtgcagtacacatccaattatgcaaaatctgccaacgttgattttactgtggacaacaatggactttatactgagcctcgccccattggcacccgttaccttacccgtcccctg

SEQ ID NO: 664 - DNA, 2208 bp, Artificial Sequence
  source: /note="Description of Artificial Sequence: Synthetic polynucleotide"
atggctgccgatggttatcttccagattggctcgaggacaacctctctgagggcattcgcgagtggtgggacttgaaacctggagccccgaagcccaaagccaaccagcaagagcaggacgacggccggggtctggtgcttcctggctacaagtacctcggacccttcaacggactcgacaagggggagcccgtcaacgcggcggacgcagcggccctcgagcacgacaaggcctacgaccagcagctcaaagcgggtgacaatccgtacctgcggtataaccacgccgacgccgagtttcaggagcgtctgcaagaagatacgtcttttgggggcaacctcgggcgagcagtcttccaggccaagaagcgggttctcgaacctctcggtctggttgaggaaggcgctaagacggctcctggaaagaaacgtccggtagagcagtcgccacaagagccagactcctcctcgggcatcggcaagacaggccagcagcccgctaaaaagagactcaattttggtcagactggcgactcagagtcagtccccgatccacaacctctcggagaacctccagcaacccccgctgctgtgggacctactacaatggcttcaggcggtggcgcaccaatggcagacaataacgaaggcgccgacggagtgggtaatgcctcaggaaattggcattgcgattccacatggctgggcgacagagtcatcaccaccagcacccgcacctgggccttgcccacctacaataaccacctctacaagcaaatctccagtgcttcaacgggggccagcaacgacaaccactacttcggctacagcaccccctgggggtattttgatttcaacagattccactgccacttttcaccacgtgactggcagcgactcatcaacaacaattggggattccggcccaagagactcaacttcaaactcttcaacatccaagtcaaggaggtcacgacgaatgatggcgtcacaaccatcgctaataaccttaccagcacggttcaagtcttctcggactcggagtaccagcttccgtacgtcctcggctctgcgcaccagggctgcctccctccgttcccggcggacgtgttcatgattccgcaatacggctacctgacgctcaacaatggcagccaagccgtgggacgttcatccttttactgcctggaatatttcccttctcagatgctgagaacgggcaacaactttaccttcagctacacctttgaggaagtgcctttccacagcagctacgcgcacagccagagcctggaccggctgatgaatcctctcatcgaccaatacctgtattacctgaacagaactcaaaatcagtccggaagtgcccaaaacaaggacttgctgtttagccgtgggtctccagctggcatgtctgttcagcccaaaaactggctacctggaccctgttatcggcagcagcgcgtttctaaaacaaaaacagacaacaacaacagcaattttacctggactggtgcttcaaaatataacctcaatgggcgtgaatccatcatcaaccctggcactgctatggcctcacacaaagacgacgaagacaagttctttcccatgagcggtgtcatgatttttggaaaagagagcgccggagcttcaaacactgcattggacaatgtcatgattacagacgaagaggaaattaaagccactaaccctgtggccaccgaaagatttgggaccgtggcagtcaatttccagagcagcagcacagaccctgcgaccggagatgtgcatgctacgggaacattacctggcatggtgtggcaagatagagacgtgtacctgcagggtcccatttgggccaaaattcctcacacagatggacactttcacccgtctcctcttatgggcggctttggactcaagaacccgcctcctcagatcctcatcaaaaccacgcctgttcctgcgaatcctccggcggagttttcagctacaaagtttgcttcattcatcacccagtactccacaggacaagtgagtgtggaaattgaatgggagctgcagaaagaaaacagcaagcgctggaatcccgaagtgcagtacacatccaattatgcaaaatctgccaacgttgattttactgtggacgacaatggactttatactgagcctcgccccattggcacccgttaccttacccgtcccctg

SEQ ID NO: 665 - DNA, 2208 bp, Artificial Sequence
  source: /note="Description of Artificial Sequence: Synthetic polynucleotide"
atggctgccgatggttatcttccagattggctcgaggacaacctctctgagggcattcgcgagtggtgggacttgaaacctggagccccgaagcccaaagccaaccagcaaaagcaggacgacggccggggtctggtgcttcctggctacaagtacctcggacccttcaacggactcgacaagggggagcccgtcaacgcggcggacgcagcggccctcgagcacgacaaggcctacgaccagcagctcaaagcgggtgacaatccgtacctgcggtataaccacgccgacgccgagtttcaggagcgtctgcaagaagatacgtcttttgggggcaacctcgggcgagcagtcttccaggccaagaagcgggttctcgaacctctcggtctggttgaggaaggcgctaagacggctcctggaaagaaacgtccggtagagcagtcgctacaagagccagactcctcctcgggcatcggcaagacaggccagcagcccgctaaaaagagactcaattttggtcagactggcgactcagagtcagtccccgatccacaacctctcggagaacctccagcaacccccgctgctgtgggacctactacaatggcttcaggcggtggcgcaccaatggcagacaataacgaaggcgccgacggagtgggtaatgcctcaggaaattggcattgcgattccacatggctgggcgacagagtcatcaccaccagcacccgcacctgggccttgcccacctacaataaccacctctacaagcaaatctccagtgcttcaacgggggccagcaacgacaaccactacttcggctacagcaccccctgggggtattttgatttcaacagattccactgccacttttcaccacgtgactggcagcgactcatcaacaacaattggggattccggcccaagagactcaacttcaaactcttcaacatccaagtcaaggaggtcacgacgaatgatggcgtcacaaccatcgctaataaccttaccagcacggttcaagtcttctcggactcggagtaccagcttccgtacgtcctcggctctgcgcaccagggctgcctccctccgttcccggcggacgtgttcatgattccgcaatacggctacctgacgctcaacaatggcagccaagccgtgggacgttcatccttttactgcctggaatatttcccttctcagatgctgagaacgggcaacaactttaccttcagctacacctttgaggaagtgcctttccacagcagctacgcgcacagccagagcctggaccggctgatgaatcctctcatcgaccaatacctgtattacctgaacagaactcaaaatcagtccggaagtgcccaaaacaaggacttgctgtttagccgtgggtctccagctggcatgtctgttcagcccaaaaactggctacctggaccctgttatcggcagcagcgcgtttctaaaacaaaaacagacaacgacaacagcaattttacctggactggtgcttcaaaatataacctcaatgggcgtgaatccatcatcaaccctggcactgctatggcctcacacaaagacgacgaagacaagttctttcccatgagcggtgtcatgatttttggaaaagagagcgccggagcttcaaacactgcattggacaatgtcatgattacagacgaagaggaaattaaagccactaaccctgtggccaccgaaagatttgggaccgtggcagtcaatttccagagcagcagcacagaccctgcgaccggagatgtgcatgctatgggagcattacctggcatggtgtggcaagatagagacgtgtacctgcagggtcccatttgggccaaaattcctcacacagatggacactttcacccgtctcctcttatgggcggctttggactcaagaacccgcctcctcagatcctcatcaaaaacacgcctgttcctgcgaatcctccggcggagttttcagctacaaagtttgcttcattcatcacccaatactccacaggacaagtgagtgtggaaattgaatgggagctgcagaaagaaaacagcaagcgctggaatcccgaagtgcagtacacatccaattatgcaaaatctgccaacgttgattttactgtggacaacaatggactttatactgagcctcgccccattggcacccgttaccttacccgtcccctg

SEQ ID NO: 666 - DNA, 2208 bp, Artificial Sequence
  source: /note="Description of Artificial Sequence: Synthetic polynucleotide"
atggctgccgatggttatcttccagattggctcgaggacaacctctctgagggcattcgcgagtggtgggacttgaaacctggagctccgaagcccaaagccaaccagcaaaagcaggacgacggccggggtctggtgcttcctggctacaagtacctcggacccttcaacggactcgacaagggggagcccgtcaacgcggcggacgcagcggccctcgagcacgacaaggcctacgaccagcagctcaaagcgggtgacaatccgtacctgcggtataaccacgccgacgccgagtttcaggagcgtctgcaagaagatacgtcttttgggggcaacctcgggcgagcagtcttccaggccaagaagcgggttctcgaacctctcggtctggttgaggaaggcgctaagacggctcctggaaagaaacgtccggtagagcagtcgccacaagagccagactcctcctcgggcatcggcaagacaggccagcagcccgctaaaaagagactcaattttggtcagactggcgactcagagtcagtccccgatccacaacctctcggagaacctccagcaacccccgctgctgtgggacctactacaatggcttcaggcggtggcgcaccaatggcagacaataacgaaggcgccgacggagtgggtaatgcctcaggaaattggcattgcgattccacatggctgggcgacagagtcatcaccaccagcacccgcacctgggccttgcccacctacaataaccacctctacaagcaaatctccagtgcttcaacgggggccagcaacgacaaccactacttcggctacagcaccccctgggggtattttgatttcaacagattccactgccacttttcaccacgtgactggcagcgactcatcaacaacaattggggattccggcccaagagactcaacttcaaactcttcaacatccaagtcaaggaggtcacgacgaatgatggcgtcacaaccatcgctaataaccttaccagcacggttcaagtcttctcggactcggagtaccagcttccgtacgtcctcggctctgcgcaccagggctgcctccctccgttcccggcggacgtgttcatgattccgcaatacggctacctgacgctcaacaatggcagccaagccgtgggacgttcatccttttactgcctggaatatttcccttctcagatgctgagaacgggcaacaactttaccttcagctacacctttgaggaagcgcctttccacagcagctacgcgcacagccagagcctggaccggctgatgaatcctctcatcgaccaatacctgtattacctgaacagaactcaaaatcagtccggaagtgcccaaaacaaggacttgctgtttagccgtgggtctccagctggcatgtctgttcagcccaaaaactggctacctggaccctgttatcggcagcagcgcgtttctaaaacaaaaacagacaacaacaacagcaattttacctggactggtgcttcaaaatataacctcaatgggcgtgaatccatcatcaaccctggcactgctatggcctcacacaaagacgacgaagacaagttctttcccatgagcggtgtcatgatttttggaaaagagagcgccggagcttcaaacactgcattggacaatgtcatgattacagacgaagaggaaattaaagccactaaccctgtggccaccgaaagatttgggaccgtggcagtcaatttccagagcagcagcacagaccctgcgaccggagatgtgcatgctatgggagcattacctggcatggtgtggcaagatagagacgtgtacctgcagggtcccatttgggccaaaattcctcacacagatggacactttcacccgtctcctcttatgggcggctttggactcaagaacccgcctcctcagatcctcatcaaaaacacgcctgttcctgcgaatcctccggcggagttttcagctacaaagtttgcttcattcatcacccaatactccacaggacaagtgagtgtggaaattgaatgggagctgcagaaagaaaacagcaagcgctggaatcccgaagtgcagtacacatccaattatgcgaaatctgccaacgttgattttactgtggacaacaatggactttatactgagcctcgccccgttggcacccgttaccttacccgtcccctg

SEQ ID NO: 667 - DNA, 2208 bp, Artificial Sequence
  source: /note="Description of Artificial Sequence: Synthetic polynucleotide"
atggctgccgatggttatcttccagattggctcgaggacaacctctctgagggcattcgcgagtggtgggacttgaaacctggagccccgaagcccaaagccaaccagcaaaagcaggacgacggccggggtctggtgcttcctggctacaagtacctcggacccttcaacggactcgacaagggggagcccgtcaacgcggcggacgcagcggccctcgagcacgacaaggcctacgaccagcagctcaaagcgggtgacaatccatacctgcggtataaccacgccgacgccgagtttcaggagcgtctgcaagaaaatacgtcttttgggggcaacctcgggcgagcagtcttccaggccaagaagcgggttctcgaacctctcggtctggttgaggaaggcgctaagacggctcctggaaagaaacgtccggtagagcagtcgccacaagagccagactcctcctcgggcatcggcaagacaggccagcagcccgctaaaaagagactcaattttggtcagactggcgactcagagtcagtccccgatccacaacctctcggagaacctccagcaacccccgctgctgtgggacctactacaatggcttcaggcggtggcgcaccaatggcagacaataacgaaggcgccgacggagtgggtaatgcctcaggaaattggcattgcgattccacatggctgggcgacagagtcatcaccaccagcacccgcacctgggccttgcccacctacaataaccacctctacaagcaaatctccagtgcttcaacgggggccagcaacgacaaccactacttcggctacagcaccccctgggggtattttgatttcaacagattccactgccactttccaccacgtgactggcagcgactcatcaacaacaattggggattccggcccaagagactcaacttcaaactcttcaacatccaagtcaaggaggtcacgtcgaatgatggcgtcacaaccatcgctaataaccttaccagcacggttcaagtcttctcggactcggagtaccagcttccgtacgtcctcggctctgcgcaccagggctgcctccctccgttcccggcggacgtgttcatgattccgcaatacggctacctgacgctcaacaatggcagccaagccgtgggacgttcatccttttactgcctggaatatttcccttctcagatgctgagaacgggcaacaactttaccttcagctacacctttgaggaagtgcctttccacagcagctacgcgcacagccagagcctggaccggctgatgaatcctctcatcgaccaatacctgtattacctgaacagaactcaaaatcagtccggaagtgcccaaaacaaggacttgctgtttagccgtgggtctccagctggcatgtctgttcagcccaaaaactggctacctggtccctgttatcggcagcagcgcgtttctaaaacaaaaacagacaacaacaacagcaattttacctggactggtgcttcaaaatataacctcaatgggcgtgaatccatcatcaaccctggcactgctatggcctcacacaaagacgacgaagacaagttctttcccatgagcggtgtcatgatttttggaaaagagagcgccggagcttcaaacactgcattggacaatgtcatgattacagacgaagaggaaattaaagccactaaccctgtggccaccgaaagatttgggaccgtggcagtcaatttccagagcagcagcacagaccctgcgaccggagatgtgcatgctatgggagcattacctggcatggtgtggcaagatagagacgtgtacctgcagggtcccatttgggccaaaattcctcacacagatggacactttcacccgtctcctcttatgggcggctttggactcaagaacccgcctcctcagatcctcatcaaaaacacgcctgttcctgcgaatcctccggcggagttttcagctacaaagtttgcttcattcatcacccaatactccacaggacaagtgagtgtggaaattgaatgggagctgcagaaagaaaacagcaagcgctggaatcccgaagtgcagtacacatccaattatgcaaaatctgccaacgttgattttactgtggacaacaatggactttatactgagcctcgccccattggcacccgttaccttacccgtcccctg

SEQ ID NO: 668 - DNA, 2208 bp, Artificial Sequence
  source: /note="Description of Artificial Sequence: Synthetic polynucleotide"
atggctgccgatggttatcttccagattggctcgaggacaacctctctgagggcattcgcgagtggtgggacttgaaacctggagccccgaagcccaaagccaaccagcaaaagcaggacgacggccggggtctggtgcttcctggctacaagtacctcggacccttcaacggactcgacaagggggagcccgtcaacgcggcggacgcagcggccctcgagcacgacaaggcctacgaccagcagctcaaagcgggtgacaatccgtacctgcggtataaccacgccgacgccgagtttcaggagcgtctgcaagaagatacgtcttttgggggcaacctcgggcgagcagtcttccaggccaagaagcgggttctcgaacctctcggtctggttgaggaaggcgctaagacggctcctggaaagaaacgtccggtagagcagtcgccacaagagccagactcctcctcgggcatcggcaagacaggccagcagcccgctaaaaagagactcaattttggtcagactggcgactcagagtcagtccccgatccacaacctctcggagaacctccagcaacccccgctgctgtgggacctactacaatggcttcaggcggtggcgcaccaatggcagacaataacgaaggcgccgacggagtgggtaatgcctcaggaaattggcattgcgattccacatggctgggcgacagagtcatcaccaccagcacccgcacctgggccttgcccacctacaataaccacctctacaagcaaatctccagtgcttcaacgggggccagcaacgacaaccactacttcggctacagcaccccctgggggtattttgatttcaacagattccactgccacttttcaccacgtgactggcagcgactcatcaacaacaattggggattccggcccaagagactcaacttcaaactcttcaacatccaagtcaaggaggtcacgacgaatgatggcgtcacaaccatcgctaataaccttaccagcacggttcaagtcttctcggactcggagtaccagcttccgtacgtcctcggctctgcgcaccagggctgcctccctccgttcccggcggacgtgttcatgattccgcaatacggctacctgacgctcaacaatggcagccaagccgtgggacgttcatccttttactgcctggaatatttcccttctcagatgctgagaacgggcaacaactttaccttcagctacacctttgaggaagtgcctttccacagcagctacgcgcacagccagagcctggaccggctgatgaatcctctcatcgaccaatacctgtattacctgaacagaactcaaaatcagtccggaagtgcccaaaacaaggacttgctgtttagccgtgggtctccagctggcacgtctgttcagcccaaaaactggctacctggaccctgttatcggcagcagcgcgtttctaaaacaaaaacagacaacaacaacagcaattttacctggactggtgcttcaaaatataacctcaatgggcgtgaatccatcatcaaccctggcactgctatggcctcacacaaagacgacgaagacaagttctttcccatgagcggtgtcatgatttttggaaaagagagcgccggagcttcaaacactgcattggacaatgtcatgattacagacgaagaggaaattaaagccactaaccctgtggccaccgaaagatttgggaccgtggcagtcaatttccagagcagcagcacagaccctgcgaccggagatgtgcatgctatgggagcattacctggcatggtgtggcaagatagagacgtgtacctgcagggtcccatttgggccaaaattcctcacacagatggacactttcacccgtctcctcttatgggcggctttggactcaagaacccgcctcctcagatcctcatcaaaaacacgcctgttcctgcgaatcctccggcggagttttcagctacaaagtttgcttcattcatcacccaatactccacaggacaagtgagtgtggaaattgaatgggagctgcagaaagaaaacagcaagcgctggaatcccgaagtgcagtacacatccaattatgcaaaatctgccaacgttgattttactgtggacaacaatggactttatactgggcctcgccccattggcacccgttaccttacccgtcccctg

SEQ ID NO: 669 - DNA, 2208 bp, Artificial Sequence
  source: /note="Description of Artificial Sequence: Synthetic polynucleotide"
atggctgccgatggttatcttccagattggctcgaggacaacctctctgagggcattcgcgagtggtgggacttgaaacctggagccccgaagcccaaagccaaccagcaaaagcaggacgacggccggggtctggtgcttcctggctacaagtacctcggacccttcaacggactcgacaagggggagcccgtcaacgcggcggacgcagcggccctcgagcacgacaaggcctacgaccagcagctcaaagcgggtgacaatccgtacctgcggtataaccacgccgacgccgagtttcaggagcgtctgcaagaagatacgtcttttgggggcaacctcgggcgagcagtcttccaggccaagaagcgggttctcgaacctctcggtctggttgaggaaggcgctaagacggctcctggaaagaaacgtccggtagagcagtcgccacaagagccagactcctcctcgggcatcggcaagacaggccagcagcccgctaaaaagagactcaattttggtcagactggcgactcagagtcagtccccgatccacaacctctcggagaacctccagcaacccccgctgctgtgggacctactacaatggcttcaggcggtggcgcaccaatggcagacaataacgaaggcgccgacggagtgggtaatgccccaggaaattggcattgcgactccacatggctgggcgacagagtcatcaccaccagcacccgcacctgggccttgcccacctacaataaccacctctacaagcaaatctccagtgcttcaacgggggccagcaacgacaaccactacttcggctacagcaccccctgggggtattttgatttcaacagattccactgccacttttcaccacgtgactggcagcgactcatcaacaacaattggggattccggcccaagagactcaacttcaaactcttcaacatccaagtcaaggaggtcacgacgaatgatggcgtcacaaccatcgctaataaccttaccagcacggttcaagtcttctcggactcggagtaccagcttccgtacgtcctcggctctgcgcaccagggctgcctccctccgttcccggcggacgtgttcatgattccgcaatacggctacctgacgctcaacaatggcagccaagccgtgggacgttcatccttttactgcctggaatatttcccttctcagatgctgagaacgggcaacaactttaccttcagctacacctttgaggaagtgcctttccacagcagctacgcgcacagccagagcctggaccggctgatgaatcctctcatcgaccaatacctgtattacctgaacagaactcaaaatcagtccggaagtgcccaaaacaaggacttgctgtttagccgtgggtctccagctggcatgtctgttcagcccaaaaactggctacctggaccctgttatcggcagcagcgcgtttctaaaacaaaaacagacaacaacaacagcaattttacctggactggtgcttcaaaatataacctcaatgggcgtgaatccatcatcaaccctggcacagctatggcctcacacaaagacgacgaagacaagttctttcccatgagcggtgtcatgatttttggaaaagagagcgccggagcttcaaacactgcattggacaatgtcatgattacaggcgaagaggaaattaaagccactaaccctgtggccaccgaaagatttgggaccgtggcagtcaatttccagagcagcagcacagaccctgcgaccggagatgtgcatgctatgggagcattacctggcatggtgtggcaagatagagacgtgtacctgcagggtcccatttgggccaaaattcctcacacagatggacactttcacccgtctcctcttatgggcggctttggactcaagaacccgcctcctcagatcctcatcaaaaacacgcctgttcctgcgaatcctccggcggagttttcagctacaaagtttgcttcattcatcacccaatactccacaggacaagtgagtgtggaaattgaatgggagctgcagaaagaaaacagcaagcgctggaatcccgaagtgcagtacacatccaattatgcaaaatctgccaacgttgattttactgtggacaacaatggactttatactgagcctcgccccattggcacccgttaccttacccgtcccctg

SEQ ID NO: 670 - DNA, 2208 bp, Artificial Sequence
  source: /note="Description of Artificial Sequence: Synthetic polynucleotide"
atggctgccgatggttatcttccagattggctcgaggacaacctctctgagggcattcgcgagtggtgggacttgaaacctggagccccgaagcccaaagccaaccagcaaaagcaggacgacggccggggtctggtgcttcctggctacaagtacctcggacccttcaacagactcgacaagggggagcccgtcaacgcggcggacgcagcggccctcgagcacgacaaggcctacgaccagcagctcaaagcgggtgacaatccgtacctgcggtataaccacgccgacgccgagtttcaggagcgtctgcaagaagatacgtcttttgggggcaacctcgggcgagcagtcttccaggccaagaagcgggttctcgaacctctcggtctggttgaggaaggcgctaagacggctcctggaaggaaacgtccggtagagcagtcgccacaagagccagactcctcctcgggcatcggcaagacaggccagcagcccgctaaaaagagactcaattttggtcagactggcgactcagagtcagtccccgatccacaacctctcggagaacctccagcaacccccgctgctgtgggacctactacaatggcttcaggcggtggcgcgccaatggcagacaataacgaaggcgccgacggagtgggtaatgcctcaggaaattggcattgcgattccacatggctgggcgacagagtcatcaccaccagcacccgcacctgggccttgcccacctacaataaccacctctacaagcaaatctccagtgcttcaacgggggccagcaacgacaaccactacttcggctacagcaccccctgggggtattttgatttcaacagattccactgccacttttcaccacgtgactggcagcgactcatcaacaacaattggggattccggcccaagagactcaacttcaaactcttcaacatccaagtcaaggaggtcacgacgaatgatggcgtcacaaccatcgctaataaccttaccagcacggttcaagtcttctcggactcggagtaccagcttccgtacgtcctcggctctgcgcaccagggctgcctccctccgttcccggcggacgtgttcatgattccgcaatacggctacctgacgctcaacaatggcggccaagccgtgggacgttcatccttttactgcctggaatatttcccttctcagatgctgagaacgggcaacaactttaccttcagctacacctttgaggaagtgcctttccacagcagctacgcgcacagccagagcctggaccggctgatgaatcctctcatcgaccaatacctgtattacctgaacagaactcaaaatcagtccggaagtgcccaaaacaaggacttgctgtttagccgtgggtctccagctggcatgtctgttcagcccaaaaactggctacctggaccctgttatcggcagcagcgcgtttctaaaacaaaaacagacaacaacaacagcaattttacctggactggtgcttcaaaatatagcctcaatgggcgtgaatccatcatcaaccctggcactgctatggcctcacacaaagacgacgaagacaagttctttcccatgggcggtgtcatgatttttggaaaagagagcgccggagcttcaaacactgcattggacaatgccatgattacagacgaagaggaaattaaagccactaaccctgtggccaccgaaagatttgggaccgtggcagtcaatttccagagcagcagcacagaccctgcgaccggagatgtgcatgctatgggagcattacctggcatggtgtggcaagatagagacgtgtacctgcagggtcccatttgggccaaaattcctcacacagatggacactttcacccgtctcctcttatgggcggctttggactcaagaacccgcctcctcagatcctcatcaaaaacacgcctgttcctgcgaatcctccggcggagttttcagctacaaagtttgcttcattcatcacccaatactccacaggacaagtgagtgtggaaattgaatgggagctgcagaaagaaaacagcaagcgctggaatcccgaagtgcagtacacatccaattatgcaaaatctgccaacgttgattttactgtggacaacaatggactttatactgagcctcgccccattggcacccgttaccttacccgtcccctg

SEQ ID NO: 671 - DNA, 2208 bp, Artificial Sequence
  source: /note="Description of Artificial Sequence: Synthetic polynucleotide"
atggctgccgatggttatcttccagattggctcgaggacaacctctctgagggcattcgcgagtggtgggacttgaaacctggagccccgaagcccaaagccaaccagcaaaagcaggacgacggccggggtctggtgcttcctggctacaagtacctcggacccttcaacggactcgacaagggggagcccgtcaacgcggcggacgcagcggccctcgagcacgacaaggcctacgaccagcagctcaaagcgggtgacaatccgtacctgcggtataaccacgccgacgccgagtttcaggagcgtctgcaagaagatacgtcttttgggggcaacctcgggcgagcagtcttccaggccaagaagcgggttctcgaacctctcggtctggttgaggaaggcgctaagacggctcctggaaagaaacgtccggtagagcagtcgccacaagagccagactcctcctcgggcatcggcaagacaggccagcagcccgctaaaaagagactcaattttggtcagactggcgactcagagtcagtccccgatccacaacctctcggagaacctccagcaacccccgctgctgtgggacctactacaatggcttcaggcggtggcgcaccaatggcagacaataacgaaggcgccgacggagtgggtaatgcctcaggaaattggcattgcgattccacatggctgggcggcagagtcatcaccaccagcacccgcacctgggccttgcccacctacaataaccacctctacaagcaaatctccagtgcttcaacgggggccagcaacgacaaccactacttcggctacagcaccccctgggggtattttgatttcaacagattccactgccacttttcaccacgtgactggcagcgactcatcaacaacaattggggattccggcccaagagactcaacttcaaactcttcaacatccaagtcaaggaggtcacgacgaatgatggcgtcacaaccatcgctaataaccttaccagcacggttcaagtcttctcggactcggagtaccagcttccgtacgtcctcggctctgcgcaccagggctgcctccctccgttcccggcggacgtgttcatgattccgcaatacggctacctgacgctcaacaatggcagccaagccgtgggacgttcatccttttactgcctggaatatttcccttctcagatgctgagaacgggcaacaactctaccttcagctacacctttgaggaagtgcctttccacagcagctacgcgcacagccagagcctggaccggctgatgaatcctctcatcgaccaatacctgtattacctgaacagaactcaaaatcagtccggaagtgcccaaaacaaggacttgctgtttagccgtgggtctccagctggcatgtctgttcagcccaaaaactggctacctggaccctgttatcggcagcagcgcgtttctaaaacaaaaacagacaacaacaacagcaattttacctggactggtgcttcaaaatataacctcaatgggcgtgaatccatcatcaaccctggcactgctatggcctcacacaaagacgacgaagacaagttctttcccatgagcggtgtcatgatttttggaaaagagagcgccggagcttcaaacactgcattggacaatgtcatgattacagacgaagaggaaattaaagccactaaccctgtggccaccgaaagatttgggaccgtggcagtcaatttccagagcagcagcacagaccctgcgaccggagatgtgcatgctatgggaacattacctggcatggtgtggcaagatagagacgtgtacctgcagggtcccatttgggccaaaattcctcacacagatggacactttcacccgtctcctcttatgggcggctttggactcaagaacccgcctcctcagatcctcatcaaaaacacgcctgttcctgcgaatcctccggcggagttttcagctacaaagtttgcttcattcatcacccaatactccacaggacaagtgagtgtggaaattgaatgggagctgcagaaagaaaacagcaagcgctggaatcccgaagtgcagtacacatccaattatgcaaaatctgccaacgttgattttactgtggacaacaatggactttatactgagcctcgccccattggcacccgttaccttacccgtcccctg

SEQ ID NO: 672 - DNA, 2208 bp, Artificial Sequence
  source: /note="Description of Artificial Sequence: Synthetic polynucleotide"
atggctgccgatggttatctcccagattggctcgaggacaacctctctgagggcattcgcgagtggtgggacttgaaacctggagccccgaagcccaaagccaaccagcaaaagcaggacgacggccggggtctggtgcttcctggctacaagtacctcggacccttcaacggactcgacaagggggagcccgtcagcgcggcggacgcagcggccctcgagcacgacaaggcctacgaccagcagctcaaagcgggtgacaatccgtacctgcggtataaccacgccgacgccgagtttcaggagcgtctgcaagaagatacgtcttttgggggcaacctcgggcgagcagtcttccaggccaagaagcgggttctcgaacctctcggtctggttgaggaaggcgctaagacggctcctggaaagaaacgtccggtagagcagtcgccacaagagccagactcctcctcgggcatcggcaagacaggccagcagcccgctaaagagagactcaattttggtcagactggcgactcagagtcagtccccgatccacaacctctcggagaacctccagcaacccccgctgctgtgggacctactacaatggcttcaggcggtggcgcaccaatggcagacaataacgaaggcgccgacggagtgggtaatgcctcaggaaattggcattgcgattccacatggctgggcgacagagtcatcaccaccagcacccgcacctgggccttgcccacctacaataaccacctctacaagcaaatctccagtgcttcaacgggggccagcaacgacaaccactacttcggctacagcaccccctgggggtattttgatttcaacagattccactgccacttttcaccacgtgactggcagcgactcatcaacaacaattggggattccggcccaagagactcaacttcaaactcttcaacatccaagtcaaggaggtcacgacgaatgatggcgtcacaaccatcgccaataaccttaccagcacggttcaagtcttctcggactcggagtaccagcttccgtacgtcctcggctctgcgcaccagggctgcctccctccgttcccggcggacgtgttcatgattccgcaatacggctacctgacgctcaacaatggcagccaagccgtgggacgttcatccttttactgcctggaatatttcccttctcagatgctgagaacgggcaacaactttaccttcagctacacctttgaggaagtgcctttccacagcagctacgcgcacagccagagcctggaccggctgatgaatcctctcatcgaccaatacctgtattacctgaacagaactcaaaatcagtccggaagtgcccaaaacaaggacttgctgtttagccgtgggtctccagctggcatgtctgttcagcccaaaaactggctacctggaccctgttatcggcagcagcgcgtttctaaaacaaaaacagacaacaacaacagcaattttacctggactggtgcttcaaaatataacctcaatgggcgtgaatccatcatcaaccctggcactgctatggcctcacacaaagacgacgaagacaagttctttcccatgagcggtgtcatgatttttggaaaagagagcgccggagcttcaaacactgcattggacaatgtcatgattacagacgaagaggaaattaaagccactaaccctgtggccaccgaaagatttgggaccgtggcagtcaatttccagagcagcagcacagaccctgcgaccggagatgtgcatgctatgggagcattacctggcatggtgtggcaagatagagacgtgtacctgcagggtcccatttgggccaaaattcctcacacagatggacactttcacccgtctcctcttatgggcggctttggactcaagaacccgcctcctcagatcctcatcaaaaacacgcctgttcctgcgaatcctccggcggagttttcagctacaaagtttgcttcattcatcacccaatactccacaggacaagtgagtgtggaaattgaatgggagctgcagaaagaaaacagcaagcgctggaatcccgaagtgcagtacacatccaattatgcaaaatctgccaacgttgattttactgtggacaacaatggactttatactgagcctcgccccattggcacccgttaccttacccgtcccctg

SEQ ID NO: 673 - DNA, 2208 bp, Artificial Sequence
  source: /note="Description of Artificial Sequence: Synthetic polynucleotide"
atggctgccgatggttatcttccagattggctcgaggacaacctctctgagggcattcgcgagtggtgggacttgaaacctggagccccgaagcccaaagccaaccagcaaaagcaggacgacggccggggtctggtgcttcctggctacaagtacctcggacccttcaacggactcgacaagggggagcccgtcaacgcggcggacgcagcggccctcgagcacgacaaggcctacgaccagcagctcaaagcgggtgacaatccgtacctgcggtataaccacgccgacgccgagtttcaggagcgtctgcaagaagatacgtcttttgggggcaacctcgggcgagcagtcttccaggccaagaagcgggttctcgaacctctcggtctggttgaggaaggcgctaagacggctcctggaaagaaacgtccggtagagcagtcgccacaagagccagactcctcctcgggcatcggcaagacaggccagcagcccgctaaaaagagactcaattttggtcagactggcgactcagagtcagtccccgatccacaacctctcggagaacctccagcaacccccgctgctgtgggacctactacaatggcttcaggcggtggcgcaccaatggcagacaataacgaaggcgccgacggagtgggtaatgcctcaggaaattggcattgcgattccacatggctgggcgacagagtcatcaccaccagcacccgcacctgggccttgcccacctacaataaccacctctacaagcaaatctccagtgcttcaacgggggccagcaacgacaaccactacttcggctacagcaccccctgggggtattttgatttcaacagattccactgccacttttcaccacgtgactggcagcgactcatcaacaacaattggggattccggcccaagagactcaacttcaaactcttcaacatccaagtcaaggaggtcacgacgaatgatggcgtcacaaccatcgctaataaccttaccagcacggttcaagtcttctcggactcggagtaccagcttccgtacgtcctcggctctgcgcaccagggctgcctccctccgttcccggcggacgtgttcatgattccgcaatacggctacctgacgctcaacaatggcagccaagccgtgggacgttcatccttttactgcctggaatatttcccttctcagatgctgagaacgggcaacaactttaccttcagctacacctttgaggaagtgcctttccacagcagctacgcgcacagccagagcctggaccggctgatgaatcctctcatcgaccaatacctgtattacctgaacagaactcaaaatcagtccggaagtgcccaaaacaaggacttgctgtttagccgtgggtctccagctggcatgtctgttcagcccaaaaactggctacctggaccctgttatcggcagcagcgcgtttctaaaacaaaaacagacaacaacaacagcaattttacctggactggtgcttcaaaatataacctcaatgggcgtgaatccatcatcaaccctggcactgctatggcctcacacaaagacgacgaagacaagttctttcccatgagcggtgtcatgatttttggaaaagagagcgccggagcttcaaacactgcattggacaatgtcatgattacagacgaaggggaaattaaagccactaaccctgtggccaccgaaagatttgggaccgtggcagtcaatttccagagcagcagcacagaccctgcgaccggagatgtgcatgctatgggagcattacctggcatggtgtggcaagatagagacgtgtacctgcagggtcccatttgggccaaaattcctcacacagatggacactttcacccgtctcctcttatgggcggctttggactcaagaacccgcctcctcagatcctcatcaaaaacacgcctgttcctgcgaatcctccggcggagttttcagctacaaagtttgcttcattcatcacccaatactccacaggacaagtgagtgtggaaattgaatgggagctgcagaaagaaaacagcaagcgctggaatcccgaagtgcagtacacatccaattatgcaaaatctgccaacgttgattttactgtggacaacaatggactttatactgagcctcgccccattggcacccgttaccttacccgtcccctg

SEQ ID NO: 674 - DNA, 2208 bp, Artificial Sequence
  source: /note="Description of Artificial Sequence: Synthetic polynucleotide"
atggctgccgatggttatcttccagattggctcgaggacaacctctctgagggcattcgcgagtggtgggacttgaaacctggagccccgaaacctaaagccaaccagcaaaagcaggacgacggccggggtctggtgcttcctggctacaagtacctcggacccttcaacggactcgacaagggggagcccgtcaacgcggcggacgcagcggccctcgagcacgacaaggcctacgaccagcagctcaaagcgggtgacaatccgtacctgcggtataaccacgccgacgccgagtttcaggagcgtctgcaagaagatacgtcttttgggggcaacctcgggcgagcagtcttccaggccaagaagcgggttctcgaaccttttggtctggttgaggaaggcgctaagacggctcctggaaagaaacgtccggtagagcagtcgccacaagagccagactcctcctcgggcatcggcaagacaggccagcagcccgctaaaaagagactcaattttggtcagactggcgactcagagtcagtccccgacccacaacctctcggagaacctccagcaacccccgctgctgtgggacctactacaatggcttcaggcggtggcgcaccaatggcagacaataacgaaggcgccgacggagtgggtaatgcctcaggaaattggcattgcgattccacatggctgggcgacagagtcatcaccaccagcacccgcacctgggccttgcccacctacaataaccacctctacaagcaaatctccagtgcttcaacgggggccagcaacgacaaccactacttcggctacagcaccccctgggggtattttgatttcaacagattccactgccacttttcaccacgtgactggcagcgactcatcaacaacaattggggattccggcccaagagactcaacttcaagctcttcaacatccaagtcaaggaggtcacgacgaacgatggcgtcacgaccatcgctaataaccttaccagcacggttcaagtcttctcggattcagagtaccaactgccgtacgtcctcggctctgcgcaccagggctgcctccctccgttcccggcggacgtgtttatgattccgcagtacggctacctaacgctcaacaatggcagccaggccgtgggacgttcatccttttactgcccggaatatttcccttctcagatgctgagaacgggcaacaactttaccttcagctacacctttgaggaagtgcctttccacagcagctacgcgcacagccagagcctggaccggctgatgaatcctctcatcgaccaatacctgtattacctgaacagaactcaaaatcagtccggaagtgcccaaaacaaggacttgctgtttagccgtgggtctccagctggcatgtctgttcagcccaaaaactggctacctggaccctgttatcggcagcagcgcgtttctaaaacaaaaacagacaacaacaacagcaattttacctggactggtgcttcaaaatataacctcaatgggcgtgaatccatcatcaaccctggcactgctatggcctcacacaaagacgacaaagacaagttctttcccatgagcggtgtcatgatttttggaaaagagagcgccggagcttcaaatactgcattggacaatgtcatgatcacagatgaagaggaaattaaagccactaaccctgtggccaccgaaagatttgggaccgtggcagtcaatttccagagcagcaacacagaccccgcgaccggagatgtgcatgttatgggagccttacctggcatggtgtggcaagacagagacgtatacctgcagggtcccatttgggccaaaattcctcacacggatggacactttcacccgtctcctctcatgggcggctttggacttaagcacccgcctcctcaaatcctcatcaaaaacacgcctgttcctgcgaatcctccggcagagttttcggctacaaagtttgcttcattcatcacccagtactccacaggacaagtgagtgtggaaattgaatgggagctgcagaaagaaaacagcaagcgctggaatcccgaagtgcagtacacatccaattatgcaaaatctgccaacgttgatttcactgtggacaacaatggactttatactgagcctcgccccattggcacccgttaccttacccgtcccttg

SEQ ID NO: 675 - DNA, 2208 bp, Artificial Sequence
  source: /note="Description of Artificial Sequence: Synthetic polynucleotide"
atggctgccgatggttatcttccagattggctcgaggacaacctctctgagggcattcgcgagtggtgggacttgaaacctggagccccgaaacctaaagccaaccagcaaaagcaggacgacggccggggtctggtgcttcctggctacaagtacctcggacccttcaacggactcgacaagggggagcccgtcaacgcggcggacgcagcggccctcgagcacgacaaggcctacgaccagcagctcaaagcgggtgacaatccgtacctgcggtataaccacgccgacgccgagtttcaggagcgtctacaagaagatacgtcttttgggggcaacctcgggcgagcagtcttccaggccaagaagcgggttctcgaaccttttggtctggttgaggaaggcgctaagacggctcctggaaagaaacgtccggtagagcagtcgccacaagagccagactcctcctcgggcatcggcaagacaggccagcagcccgctaaaaagagactcaattttggtcagactggcgactcagagtcagtccccgacccacaacctctcggagaacctccagcaacccccgctgctgtgggacctactacaatggcttcaggcggtggcgcaccaatggcagacaataacgaaggcgccgacggagtgggtaatgcctcaggaaattggcattgcgattccacatggctgggcgacagagtcatcaccaccagcacccgcacctgggccttgcccacctacaataaccacctctacaagcaaatctccagtgcttcaacgggggccagcaacgacaaccactacttcggctacagcaccccctgggggtattttgatttcaacagattccactgccacttttcaccacgtgactggcagcgactcatcaacaacaattggggattccggcccaagagactcaacttcaagctcttcaacatccaagtcaaggaggtcacgacgaacgatggcgtcacgaccatcgctaataaccttaccagcacggttcaagtcttctcggattcagagtaccaactgccgtacgtcctcggctctgcgcaccagggctgcctccctccgttcccggcggacgtgttcatgattccgcagtacggctacctaacgctcaacaatggcagccaggccgtgggacgttcatccttttactgcctggaatatttcccttctcagatgctgagaacgggcaacaactttaccttcagctacacctttgaggaagtgcctttccacagcagctacgcgcacagccagagcctggaccggctgatgaatcctctcatcgaccaatacctgtattacctgaacagaactcaaaatcagtccggaagtgcccaaaacaaggacttgctgtttagccgtgggtctccagctggcatgtctgttcagcccaaaaactggctacctggaccctgttatcggcagcagcgcgtttctaaaacaaaaacagacaacaacaacagcaattttacctggactggtgcttcaaaatataacctcaatgggcgtgaatccatcatcaaccctggcactgctatggcctcacacaaagacgacaaagacaagttctttcccatgagcggtgtcatgatttttggaaaagagagcgccggagcttcaaatactgcattggacaatgtcatgatcacagatgaagaggaaattaaagccactaaccctgtggccaccgaaagatttgggaccgtggcagtcaatttccagagcagcgacacagaccccgcgaccggagatgtgcatgttatgggagccttacctggcatggtgtggcaagacagagacgtatacctgcagggtcccatttgggccaaaattcctcacacggatggacactttcacccgtctcctctcatgggcggctttggacttaagcacccgcctcctcaaatcctcatcaaaaacacgcctgttcctgcgaatcctccggcagagttttcggctacaaagtttgcttcattcatcacccagtactccacaggacaagtgagtgtggaaattgaatgggagctgcagaaagaaaacagcaagcgctggaatcccgaagtgcagtacacatccaattatgcaaaatctgccaacgttgatttcactgtggacaacaatggactttatactgagcctcgccccattggcacccgttaccttacccgtcccttg

SEQ ID NO: 676 - DNA, 2208 bp, Artificial Sequence
  source: /note="Description of Artificial Sequence: Synthetic polynucleotide"
atggctgccgatggttatcttccagattggctcgaggacaacctctctgagggcattcgcgagtggtgggacttgaaacctggagccccgaaacctaaagccaaccagcaaaagcagggcgacggccggggtctggtgcttcctggctacaagtacctcggacccttcaacggactcgacaagggggagcccgtcaacgcggcggacgcagcggccctcgagcacgacaaggcctacgaccagcagctcaaagcgggtgacaatccgtacctgcggtataaccacgccgacgccgagtttcaggagcgtctgcaagaagatacgtcttttgggggcaacctcgggcgagcagtcttccaggccaagaagcgggttctcgaaccttttggtctggttgaggaaggcgctaagacggctcctggaaagaaacgtccggtagagcagtcgccacaagagccagactcctcctcgggcatcggcaagacaggccagcagcccgctaaaaagagactcaattttggtcagactggcgactcagagtcagtccccgacccacaacctctcggagaacctccagcaacccccgctgctgtgggacctactacaatggcttcaggcggtggcgcaccaatggcagacaataacgaaggcgccgacggagtgggtaatgcctcaggaaattggcattgcgattccacatggctgggcgacagagtcatcaccaccaacactcgcacctgggccttgcccacctacaataaccacctctacaagcaaatctccagtgcttcaacgggggccagcaacgacaaccactacttcggctacagcaccccctgggggtattttgatttcaacagattccactgccacttttcaccacgtgactggcagcgactcatcaacaacaattggggattccggcccaagagactcaacttcaagctcttcaacatccaagtcaaggaggtcacgacgaacgatggcgtcacgaccatcgctaataaccttaccagcacggttcaagtcttctcggattcagagtaccaactgccgtacgtcctcggctctgcgcaccagggctgcctccctccgttcccggcggacgtgttcatgattccgcagtacggctacctaacgctcaacaatggcagccaggccgtgggacgttcatccttttactgcctggaatatttcccttctcagatgctgagaacgggcaacaactttaccttcagctacacctttgaggaagtgcctttccacagcagttacgggcacagccagagcctggaccggctgatgaatcttctcatcgaccaatacctgtattacctgaacagaactcaaaatcagtccggaagtgcccaaaacaaggacttgctgtttagccgtgggtctccagctggcatgtttgttcagcccaaaaactggctacctggaccctgttatcggcagcagcgcgtttctaaaacaaaaacagacaacaacaacagcaattttacctggactggtgcttcaaaatataacctcaatgggcgtgaatccatcatcaaccctggcactgctatggcctcacacaaagacgacgaagacaagttctttcccatgagcggtgtcatgatttttggaaaagagagcgccggagcttcaaatactgcattggacaatgtcatgatcacagatgaagaggaaattaaagccactaaccctgtggccaccgaaagatttgggaccgtggcagtcaatttccagagcagcagcacagaccccgcgaccggagatgtgcatgttatgggagccttacctggcatggtgtggcaagacagagacgtatacctgcagggtcccatttgggccaaaattcctcacacggatggacactttcacccgtctcctctcatgggcggctttggacttaagcacccgcctcctcaaatcctcatcaaaaacacgcctgttcctgcgaatcctccggcagagttttcggctacaaagtttgcttcattcatcacccagtactccacaggacaagtgagtgtggaaattgaatgggagctgcagaaagaaaacagcaagcgctggaatcccgaagtgcagtacacatccaattatgcaaaatctgccaacgttgatttcactgtggacaacaatggactttatactgagcctcgccccattggcacccgttaccttacccgtcccttg

SEQ ID NO: 677 - DNA, 2208 bp, Artificial Sequence
  source: /note="Description of Artificial Sequence: Synthetic polynucleotide"
atggctgccgatggttatcttccagattggctcgaggacaacctctctgagggcattcgcgagtggtgggacttgaaacctggagccccgaaacctaaagccaaccagcaaaagcaggacgacggccggggtctggtgcttcctggctacaagtacctcggacccttcaacggactcgacaagggggagcccgtcaacgcggcggacgcagcggccctcgagcacgacaaggcctacgaccagcagctcaaagcgggtgacaatccgtacctgcggtataaccacgccgacgccgagtttcaggagcgtctgcaagaagatacgtcttttgggggcaacctcgggcgagcagtcttccaggccaagaagcgggttctcgaaccttttggtctggttgaggaaggcgctaagacggctcctggaaagaaacgtccggtagagcagtcgccacaagagccagactcctcctcgggcatcggcaagacaggccagcagcccgctaaaaagagactcaattttggtcagactggcgactcagagtcagtccccgacccacaacctctcggagaacctccagcaacccccgctgctgtgggacctactacaatggcttcaggcggtggcgcaccaatggcagacaataacgaaggcgccgacggagtgggtaatgcctcaggaaattggcattgcgattccacatggctgggcgacagagtcatcaccaccaacacccgcacctgggccttgcccacctacaataaccacctctacaagcaaatctccagtgcttcaacgggggccagcaacgacaaccactacttcggctacagcaccccctgggggtattttgatttcaacagattccactgccacttttcaccacgtgactggcagcgactcatcaacaacaattggggattccggcccaagagactcaacttcaagctcttcaacatccaagtcaaggaggtcacgacgaacgatggcgtcacgaccatcgctaataaccttaccagcacggttcaagtcttctcggattcagagtaccaactgccgtacgtcctcggctctgcgcaccagggctgcctccctccgttcccggcggacgtgttcatgattccgcagtacggctacctaatgctcaacaatggcagccaggccgtgggacgttcatccttttactgcctggaatatttcccttctcagatgctgagaacgggcaacaactttaccttcagctacacctttgaggaagtgcctttccacagcagctacgcgcacagccagagcctggaccggctgatgaatcctctcatcgaccaatacctgtattacctgaacagaactcaaaatcagtccggaagtgcccaaaacaaggacttgctgtttagccgtgggtctccagctggcatgtctgttcagcccaaaaactggctacctggaccctgttatcggcagcagcgcgtttctaaaacaaaaacagacaacaacaacagcaattttacctggactggtgcttcaaaatataacctcaatgggcgtgaatccatcatcaaccctggcactgctatggcctcacacaaagacgacgaagacaagttctttcccatgagcggtgtcatgatttttggaaaagagagcgccggagcttcaaatactgcattggacaatgtcatgatcacagatgaagaggaaattaaagccactaaccctgcggccaccgaaagatttgggaccgtggcagtcaatttccagagcagcagcacagaccccgcgaccggagatgtgcatgttatgggagccttacctggcatggtgtggcaagacagagacgtatacctgcagggtcccatttgggccaaaattcctcacacggatggacactttcacccgtctcctctcatgggcggctttggacttaagcacccgcctcctcaaatcctcatcaaaaacacgcctgttcctgcgaatcctccggcagagttttcggctacaaagtttgcttcattcatcacccagtactccacaggacaagtgagtgtggaaattgaatgggagctgcagaaagaaaacagcaagcgctggaatcccgaagtgcagtacacatccaattatgcaaaatctgccaacgttgatttcactgtggacaacaatggactttatactgagcctcgccccattggcacccgttaccttacccgtcccttg

SEQ ID NO: 678 - DNA, 2208 bp, Artificial Sequence
  source: /note="Description of Artificial Sequence: Synthetic polynucleotide"
atggctgccgatggttatcttccagattggctcgaggacaacctctctgagggcattcgcgagtggtgggacttgaaacctggagccccgaaacctaaagccaaccagcaaaagcaggacgacggccggggtctggtgcttcctggctacaagtacctcggacccttcaacggactcgacaagggggagcccgtcaacgcggcggacgcagcggccctcgagcacgacaaggcctacgaccagcagctcaaagcgggtgacaatccgtacctgcggtataaccacgccgacgccgagtttcaggagcgtctgcaagaagatacgtcttttgggggcaacctcgggcgagcagtcttccaggccaagaagcgggttctcgaaccttttggtctggttgaggaaggcgctaagacggctcctggaaagaaacgtccggtagagcagtcgccacaagagccagactcctcctcgggcatcggcaagacgggccagcagcccgctaaaaagagactcaattttggtcagactggcgactcagagtcagtccccgacccacaacctctcggagaacctccagcaacccccgctgctgtgggacctactacaatggcttcaggcggtggcgcaccaatggcagacaataacgaaggcgccgacggagtgggtaatgcctcaggaaattggcattgcgattccacatggctgggcgacagagtcatcaccaccagcacccgcacctgggccttgcccacctacaataaccacctctacaagcaaatctccagtgcttcaacgggggccagcaacgacaaccactacttcggctacagcaccccctgggggtattttgatttcaacagattccactgccacttttcaccacgtgactggcagcgactcatcaacaacaattggggattccggcccaagagactcaacttcaagctcttcaacatccaagtcaaggaggtcacgacgaacgatggcgtcacgaccatcgctaataaccttaccagcacggttcaagtcttctcggattcagagtaccaactgccgtacgtcctcggctctgcgcaccagggctgcctccctccgttcccggcggacgtgttcatgattccgcagtacggctacctaacgctcaacaatggcagccaggccgtgggacgttcatccttttactgcctggaatatttcccttctcagatgctgagaacgggcaacaactttaccttcagctacacctttgaggaagtgcctttccacagcagctacgcgcacagccagagcctggaccggctgatgaatcctctcatcgaccaatacctgtattacctgaacagaactcaaaatcagtccggaagtgcccaaaacaaggacttgctgtttagccgtgggtctccagctggcatgtccgttcagcccaaaaactggctacctggaccctgttatcggcagcagcgcgtttctaaaacaaaaacagacaacaacaacagcaattttacctggactggtgcttcaaaatataacctcaatgggcgtgaatccatcatcaaccctggcactgctatggcctcacacaaagacgacgaagacaagttctttcccatgagcggtgtcatgatttttggaaaagagagcgccggagcttcaaatactgcattggacaatgtcatgatcacagatgaagaggaaattaaagccactaaccctgtggccaccgaaagatttgggaccgtggcagtcaatttccagagcagcagcacagaccccgcgaccggagatgtgcatgttatgggagccttacctggcatggtgtggcaagacagagacgtatacctgcagggtcccatttgggccaaaattcctcacacggatggacactttcacccgtctcctctcatgggcggctttggacttaagcacccgcctcctcaaatcctcatcaaaaacacgcctgttcctgcgaatcctccggcagagttttcggctacaaagtttgcttcattcatcacccagtactccacaggacaagtgagtgtggaaattgaatgggagctgcagaaagaaaacagcaagcgctggaatcccgaagtgcagtacacatccaattatgcaaaatctgccaacgttgatttcactgtggacaacaatggactttatactgagcctcgccccattggcacccgttaccttacccgtcccttg

SEQ ID NO: 679 - DNA, 2208 bp, Artificial Sequence
  source: /note="Description of Artificial Sequence: Synthetic polynucleotide"
  modified_base (305)..(305): a, c, g, or t
atggctgccgatggttatcttccagattggctcgaggacaacctctctgagggcattcgcgagtggtgggacttgaaacctggagccccgaaacctaaagccaaccagcaaaagcaggacgacggccggggtctggtgcttcctggctacaagtacctcggacccttcaacggactcgacaagggggagcccgtcaacgcggcggacgcagcggccctcgagcacgacaaggcctacgaccagcagctcaaagcgggtgacaatccgtacctgcggtataaccacgccgacgccgagtttcaggngcgtctgcaagaagatacgtcttttgggggcaacctcgggcgagcagtcttccaggccaagaagcgggttctcgaaccttttggtctggttgaggaaggcgctaagacggctcctggaaagaaacgtccggtagagcagtcgccacaagagccagactcctcctcgggcatcggcaagacaggccagcagcccgctaaaaagagactcaattttggtcagactggcgactcagagtcagtccccgacccacaacctctcggagaacctccagcaacccccgctgctgtgggacctactacaatggcttcaggcggtggcgcaccaatggcagacaataacgaaggcgccgacggagtgggtaatgcctcaggaaattggcattgcgattccacatggctgggcggcagagtcatcaccaccagcacccgcacctgggccttgcccacctacaataaccacctctacaagcaaatctccagtgcttcaacgggggccagcaacgacaaccactacttcggccacagcaccccctgggggtattttgatttcaacagattccactgccacttttcaccacgtgactggcagcgactcatcaacaacaattggggattccggcccaagagactcaacttcaagctcttcaacatccaagtcaaggaggtcacgacgaacgatggcgtcacgaccatcgctaataaccttaccagcacggttcaagtcttctcggattcagagtaccaactgccgtacgtcctcggctctgcgcaccagggctgcctccctccgtccccggcggacgtgttcatgattccgcagtacggctacctaacactcaacaatggcagccaggccgtgggacgttcatccttttactgcctggaatatttcccttctcagatgctgagaacgggcaacaactttaccttcagctacacctttgaggaagtgcctttccacagcagctacgcgcacagccagagcctggaccggctgatgaatcctctcatcgaccaatacctgtattacctgaacagaactcaaaatcagtccggaagtgcccaaaacaaggacttgctgtttagccgtgggtctccagctggcatgtctgttcagcccaaaaactggctacctggaccctgttatcggcagcagcgcgtttctaaaacaaaaacagacaacaacaacagcaattttacctggactggtgcttcaaaatataacctcaatgggcgtgaatccatcatcaaccctggcactgctatggcctcacacaaagacgacaaagacaagttctttcccatgagcggtgtcatgatttttggaaaagagagcgccggagcttcaaatactgcattggacaatgtcatgatcacagatgaagaggaaattaaagccactaaccctgtggccaccgaaagatttgggaccgtggcagtcaatttccagagcagcaacacagaccccgcgaccggagatgtgcatgttatgggagccttacctggcatggtgtggcaagacagagacgtatacctgcagggtcccatttgggccaaaattcctcacacggatggacactttcacccgtctcctctcatgggcggctttggacttaagcacccgcctcctcaaatcctcatcaaaaacacgcctgttcctgcgaatcctccggcagagttttcggctacaaagtttgcttcattcatcacccagtactccacaggacaagtgagtgtggaaattgaatgggagctgcagaaagaaaacagcaagcgctggaatcccgaagtgcagtacacatccaattatgcaaaatctgccaacgttgatttcactgtggacaacaatggactttatactgagcctcgccccattggcacccgttaccttacccgtcccttg

SEQ ID NO: 680 - DNA, 2208 bp, Artificial Sequence
  source: /note="Description of Artificial Sequence: Synthetic polynucleotide"
atggctgccgatggttattttccagattggctcgaggacaacctttctgagggcattcgcgagtggtgggacttgaaacctggagccccgaaacctaaagccaaccagcaaaagcaggacgacggccggggtctggtgcttcctggctacaagtacctcggacccttcaacggactcgacaagggggagcccgtcaacgcggcggacgcagcggccctcgagcacgacaaggcctacgaccagcagctcaaagcgggtgacaatccgtacctgcggtataaccacgccgacgccgagtttcaggagcgtctgcaagaagatacgtcttttgggggcaacctcgggcgagcagtcttccaggccaagaagcgggttctcgaaccttttggtctggttgaggaaggcgctaagacggctcctggaaagaaacgtccggtagagcagtcgccacaagagccagactcctcctcgggcatcggcaggacaggccagcagcccgctaaaaagagactcaattttggtcagactggcgactcagagtcagtccccgacccacaacctctcggagaacctccagcgacccccgctgctgtgggacctactacaatggcttcaggcggtggcgcaccaatggcagacaataacgaaggtgccgacggagtgggtaatgcctcaggaaattggcattgcgattccacatggctgggcgacagagtcatcaccaccagcacccgcacctgggccttgcccacctacaataaccacctctacaagcaaatctccagtgcttcaacgggggccagcaacgacaaccactacttcggctacagcaccccctgggggtattttgatttcaacagattccactgccacttttcaccacgtgactggcagcgactcatcaacaacaattggggattccggcccaagagactcaacttcaagctcttcaacatccaagtcaaggaggtcacgacgaacgatggcgtcacgaccatcgctaataaccttaccagcacggttcaagtcttctcggattcagagtaccaactgccgtacgtcctcggctctgcgcaccagggctgcctccctccgttcccggcggacgtgttcatgattccgcagtacggctacctaacgctcaacaatggcagccaggccgtgggacgttcatccttttactgcctggaatatttcccttctcagatgctgagaacgggcaacaactttaccttcagctacacctttgaggaagtgcctttccacagcagctacgcgcacagccagagcctggaccggctgatgaatcctctcatcgaccaatacctgtattacctgaacagaactcaaaatcagtccggaagtgcccaaaacaaggacttgctgtttagccgtgggtctccagctggcatgtctgttcagcccaaaaactggctacctggaccctgttatcggcagcagcgcgtttctaaaacaaaaacagacaacaacaacagcaattttacctggactggtgcttcaaaatataacctcaatgggcgtgaatccatcatcaaccctggcactgctatggcctcacacaaagacgacgaagacaagttctttcccatgagcggtgtcatgatttttggaaaagagagcgccggagcttcaaatactgcattggacaatgtcatgatcacagatgaagaggaaattaaagccactaaccctgtggccaccgaaagatttgggaccgtggcagtcaatttccagagcagcagcccagaccccgcgaccggagatgtgcatgttatgggagccttacctggcatggtgtggcaagacagagacgtatacctgcagggtcccatttgggccaaaattcctcacacggatggacactttcacccgtctcctctcatgggcggctttggacttaagcacccgcctcctcaaatcctcatcaaaaacacgcctgttcctgcgaatcctccggcagagttttcggctacaaagtttgcttcattcatcacccagtactccacaggacaagtgagtgtggaaattgaatgggagctgcagaaagaaaacagcaagcgctggaatcccgaagtgcagtacacatccaattatgcaaaatctgccaacgttgatttcactgtggacaacaatggactttatagtgagcctcgccccattggcacccgttaccttacccgtcccttg

SEQ ID NO: 681 - DNA, 2208 bp, Artificial Sequence
  source: /note="Description of Artificial Sequence: Synthetic polynucleotide"
atggctgccgatggttatcttccagattggctcgaggacaacctctctgagggcattcgcgagtggtgggacttgaaacctggagccccgaaacctaaagccaaccagcaaaagcaggacgacggccggggtctggtgcttcctggctacaagtacctcggacccttcaacggactcgacaagggggagcccgtcaacgcggcggacgcagcggccctcgagcacgacaaggcctacgaccagcagctcaaagcgggtgacaatccgtacctgcggtataaccacgccgacgccgagtttcaggagcgtctgcaagaagatacgtcttttgggggcaacctcgggcgagcagtcttccaggccaagaagcgggttctcgaaccttttggtctggttgaggaaggcgctaagacggctcctggaaagaaacgtccggtagagcagtcgccacaagagccagactcctcctcgggcatcggcaagacaggccagcagcccgctaaaaagagactcaattttggtcagactggcgactcagagtcagtccccgacccacaacctctcggagaacctccagcaacccccgctgctgtgggacctactacaatggcttcaggcggtggcgcaccaatggcagacaataacgaaggcgccgacggagtgggtaatgcctcaggaaattggcattgcgattccacatggctgggcgacagagtcatcaccaccagcacccgcacctgggccttgcccacctacaataaccacctctacaagcaaacctccagtgcttcaacgggggccagcaacgacaaccactacttcggctacagcaccccctgggggtattttgatttcaacagattccactgccacttttcaccacgtgactggcagcgactcatcaacaacaattggggattccggcccaagagactcaacttcaagctcttcaacatccaagtcaaggaggtcacgacgaacgatggcgtcacgaccatcgctaataaccttaccagcacggttcaagtcttctcggattcagagtaccaactgccgtacgtcctcggctctgcgcaccagggctgcctccctccgttcccggcggacgtgttcatgattccgcagtacggctacctaacgctcaacaatggcagccaggccgtgggacgttcatccttttactgcctggaatatttcccttctcagatgctgagaacgggcaacaactttaccttcagctacacctttgaggaagtgcctttccacagcagctacgcgcacagccagagcctggaccggctgatgaatcctctcatcgaccaatacctgtattacctgaacagaactcaaaatcagtccggaagtgcccaaaacaaggacttgctgtttagccgtgggtctccagctggcatgtctgttcagcccaaaaactggctacctggaccctgttatcggcagcagcgcgtttctaaaacaaaaacagactacaacaacagcaattttacctggactggtgcttcaaaatataacctcaatgggcgtgaatccatcatcaaccctggcactgctatggcctcacacaaagacgacgaagacaagttctttcccatgagcggtgtcatgatttttggaaaagagagcgccggagcttcaaatactgcattggacaatgtcatgatcacagatgaagaggaaattaaagccactaaccctgtggccaccgaaagatttgggaccgtggcagtcaatttccagagcagcagcacagaccccgcgaccggagatgtgcatgttatgggagccttacctggcatggtgtggcaagacagagacgtatacctgcagggtcccatttgggccaaaattcctcacacggatggacactttcacccgtctcctctcatgggcggctttggacttaagcacccgcctcctcaaatcctcatcaaaaacacgcctgttcctgcgaatcctccggcagagttttcggctacaaagtttgcttcattcatcacccagtactccacaggacaagtgagtgtggaaattgaatgggagctgcagaaagaaaacagcaagcgctggaatcccgaagtgcagtacacatccaattatgcaaaatctgccaacgttgatttcactgtggacaacaatggactttatactgagcctcgccccattggcacccgttaccttacccgtcccttg

SEQ ID NO: 682 - DNA, 2208 bp, Artificial Sequence
  source: /note="Description of Artificial Sequence: Synthetic polynucleotide"
atggctgccgatggttatcctccagattggctcgaggacaacctctctgagggcattcgcgagtggtgggacttgaaacctggagtcccgaaacctaaagccaaccagcaaaagcaggacgacggccggggtctggtgcttcctggctacaagtacctcggacccttcaacggactcgacaagggggagcccgtcaacgcggcggacgcagcggccctcgagcacgacaaggcctacgaccagcagctcaaagcgggtgacaatccgtacctgcggtataaccacgccgacgccgagtttcaggagcgtctgcaagaagatacgtcttttgggggcaacctcgggcgagcagtcttccaggccaagaagcgggttctcgaaccttttggtctggttgaggaaggcgctaagacggctcctggaaagaaacgtccggtagagcagtcgccacaagagccagactcctcctcgggcatcggcaagacaggccagcagcccgctaaaaagagactcaattttggtcagactggcgactcagagtcagtccccgacccacaacctctcggagaacctccagcaacccccgctgctgtgggacctactacaatggcttcaggcggtggcgcaccaatggcagacaataacgaaggcgccgacggagtgggtaatgcctcaggaaattggcattgcgattccacatggctgggcgacagagtcatcaccaccagcacccgcacctgggccttgcccacctacaataaccacctctacaagcaaatctccagtgcttcaacgggggccagcaacgacaaccactacttcggctacagcaccccctgggggtattttgatttcaacagattccactgccacttttcaccacgtgactggcagcgactcatcaacaacaattggggattccggcccaagagactcaacttcaagctcttcaacatccaagtcaaggaggtcacgacgaacgatggcgtcacgaccatcgctaataaccttaccagcacggttcaagtcttctcggattcagagtaccaactgccgtacgtcctcggctctgcgcaccagggctgcctccctccgttcccggcggacgtgttcatgattccgcagtacggctacctaacgctcaacaatggcagccaggccgtgggacgttcatccttttactgcctggaatatttcccttctcagatgctgagaacgggcaacaactttaccttcagctacacctttgaggaagtgcctttccacagcagctacgcgcacagccagagcctggaccggctgatgaatcctctcatcgaccaatacctgtattacctgaacagaactcaaaatcagtccggaagtgcccaaaacaaggacttgctgtttagccgtgggtctccagctggcatgtctgttcagcccaaaaactggctacctggaccctgttatcggcagcagcgcgtttctaaaacaaaaacagacaacaacaacagcaattttacctggactggtgcttcaaaatataacctcaatgggcgtgaatccatcatcaaccctggcactgctatggcctcacacaaagacgacgaagacaagttctttcccatgagcggtgtcatgatttttggaaaagagagcgccggagcttcaaatactgcattggacaatgtcatgatcacagatgaagaggaaattaaagccactaaccctgtggccaccgaaagatttgggaccgtggcagtcaatttccagagcagcagcacagaccccgcgaccggagatgtgcatgttatgggagccttacctggcatggtgtggcaagacagagacgtatacctgcagggtcccatttgggccaaaattcctcacacggatggacactttcacccgtctcctctcatgggcggctttggacttaagcacccgcctcctcaaatcctcatcaaaaacacgcctgttcctgcgaatcctccggcagagttttcggctacaaagtttgcttcattcatcacccagtactccacaggacaagtgagtgtggaaattgaatgggagctgcagaaagaaaacagcaagcgctggaatcccgaagtgcagtacacatccaattatgcaaaatctgccaacgttgatttcactgtggacaacaatggactttatactgagcctcgccccattggcacccgttaccttacccgtcccttg

SEQ ID NO: 683 - DNA, 2196 bp, Artificial Sequence
  source: /note="Description of Artificial Sequence: Synthetic polynucleotide"
atggctgccgatggttatcttccagattggctcgaggacaacctctctgagggcattcgcgagtggtgggacttgaaacctggagccccgaaacctaaagccaaccagcaaaagcaggacgacggccggggtctggtgcttcctggctacaagtacctcggacccttcaacggactcgacaagggggagcccgtcaacgcggcggacgcagcggccctcgagcacgacaaggcctacgaccagcagctcaaagcgggtgacaatccgtacctgcggtataaccacgccgacgccgagtttcaggagcgtctgcaagaagatacgtcttttgggggcaacctcgggcgagcagtcttccaggccaagaagcgggttctcgaaccttttggtctggttgaggaaggcgctaagacggctcctggaaagaaacgtccggtagagcagtcgccacaagagccagactcctcctcgggcatcggcaagacaggccagcagcccgctaaaaagagactcaattttggtcagactggcgactcagagtcagtccccgacccacaacctctcggagaacctccagcaacccccgctgctgtgggacctactacaatggcttcaggcggtggcgcaccaatggcagacaataacgaaggcgccgacggagtgggtaatgcctcaggaaattggcattgcgattccacatggctgggcgacagagtcatcaccaccagcacccgcacctgggccttgcccacctacaataaccacctctacaagcaaatctccagtgcttcaacgggggccagcaacgacaaccactacttcggctacagcaccccctgggggtattttgatttcaacagattccactgccacttttcaccacgtgactggcagcgactcatcaacaacaattggggattccggcccaagagactcaacttcaagctcttcaacatccaagtcaaggaggtcacgacgaacgatggcgtcacgaccatcgctaataaccttaccagcacggttcaagccttctcggattcagagtaccaactgccgtacgtcctcggctctgcgcaccagggctgcctccctccgttcccggcggacgtgttcatgattccgcagtacggctacctaacgctcaacaatggcagccaggccgtgggacgttcatccttttactgcctggaatatttcccttctcagatgctgagaacgggcaacaactttaccttcagctacacctttgaggaagtgcctttccacagcagctacgcgcacagccagagcctggaccggctgatgaatcctctcatcgacccatacctgtattacctgaacagaactcaaaatcagtccggaagtgcccaaaacaaggacttgctgtttagccgtgggtctccagctggcatgtctgttcagcccaaaaactggctacctggaccctgttatcggcagcagcgcgtttctaaaacaaaaacagacaacaacaacagcaattttacctggactggtgcttcaaaatataacctcaatgggcgtgaatccatcatcaaccctggcactgctatggcctcacacaaagacgacgaagacaagttctttcccatgagcggtgtcatgatttttggaaaagagagcgccggagcttcaaatactgcattggacaatgtcatgatcacagatgaagaggaaattaaagccactaaccctgtggccaccgaaagatttgggaccgtggcagtcaatttccagagcagcagcacagaccccgcgaccggagatgtgcatgttatgggagccttacctggcatggtgtggcaagacagagacgtatacctgcagggtcccatttgggccaaaattcctcacacggatggacactttcacccgtctcctctcatgggcggctttggacttaagcacccgcctcctcaaatcctcatcaaaaacacgcctgttcctgcgaatcctccggcagagttttcggctacaaagtttgcttcattcatcacccagtactccacaggacaagtgagtgtggaaattgaatgggagctgcagaaagaaaacagcaagcgctggaatcccgaagtgcagtacacatccaattatgcaaaatctgccaacgttgatttcactgtggacaacaatggactttatactgagcctcgccccattggcacccgttacctt

SEQ ID NO: 684 - DNA, 2208 bp, Artificial Sequence
  source: /note="Description of Artificial Sequence: Synthetic polynucleotide"
atggctgccgatggttatcttccagattggctcgaggacaacctctctgagggcattcgcgagtggtgggacttgaaacctggagccccgaaacctaaagccaaccagcaaaagcaggacgacggccggggtctggtgcttcctggctacaagtacctcggacccttcaacggactcgacaagggggagcccgtcaacgcggcggacgcagcggccctcgagcacgacaaggcctacgaccagcagctcaaagcgggtgacaatccgtacctgcggtataaccacgccgacgccgagtttcaggagcgtctgcaagaagatacgtcttttgggggcaacctcgggcgagcagtcttccaggccaagaagcgggttctcgaaccttttggtctggttgaggaaggcgctaagacggctcctggaaagaaacgtccggtagagcagtcgccacaagagccagactcctcctcgggcatcggcaagacaggccagcagcccgctaaaaagagactcaattttggtcagactggcgactcagagtcagtccccgacccacaacctctcggagaacctccagcaacccccgctgctgtgggacctactacaatggcttcaggcggtggcgcaccaatggcagacaataacgaaggcgccgacggagtgggtaatgcctcaggaaattggcattgcgattccacatggctgggcgacagagtcatcaccaccagcacccgcacctgggccttgcccacctacaataaccacctctacaagcaaatctccagtgcttcaacgggggccagcaacgacaaccactacttcggctacagcaccccctgggggtattttgatttcaacagattccactgccacttttcaccacgtgactggcagcgactcatcaacaacaattggggattccggcccaagagactcaacttcaagctcttcaacatccaagtcaaggaggtcacgacgaacgatggcgtcacgaccatcgctaataaccttaccagcacggttcaagtcttctcggattcagagtaccaactgccgtacgtcctcggctctgcgcaccagggctgcctccctccgttcccggcggacgtgttcatgattccgcagtacggctacctaacgctcaacaatggcagccaggccgtgggacgttcatccttttactgcctggaatatttcccttctcagatgctgagaacgggcaacaactttaccttcagctacacctttgaggaagtgcctttccacagcagctacgcgcacagccagagcctggaccggctgatgaatcctctcatcgaccaatacctgtattacctgaacagaactcaaaatcagtccggaagtgcccaaaacaaggacttgctgtttagccgtgggtctccagctggcatgtctgttcagcccaaaaactggctacctggaccctgttatcggcagcagcgcgtttctaaaacaaaaacagacaacaacaacagcaattttacctggactggtgcttcaaaatataacctcaatgggcgtgaatccatcatcaaccctggcactgctatggcctcacacaaagacgacgaagacaagttctttcccatgagcggtgtcatgatttttggaaaagagagcgccggagcttcaaatactgcattggacaatgtcatgatcacagatgaagaggaaattaaagccactaaccctgtggccaccgaaagatttgggaccgtggcagtcaatttccagagcagcagcacagaccccgcgaccggagatgtgcatgttatgggagccttacctggcatggtgtggcaagacagagacgtatacctgcagggtcccatttgggccaaaattcctcacacggatggacactctcacccgtctcctctcatgggcggctttggacttaagcacccgcctcctcaaatcctcatcaaaaacacgcctgttcctgcgaatcctccggcagagttttcggctacaaagtttgcttcattcatcacccagtactccacaggacaagtgagtgtggaaattgaatgggagctgcagaaagaaaacagcaagcgctggaatcccgaagtgcagtacacatccaattatgcaaaatctgccaacgttgatttcactgtggacaacaatggactttatactgagcctcgccccattggcacccgttaccttacccgtcccttg

SEQ ID NO: 685 - DNA, 2208 bp, Artificial Sequence
  source: /note="Description of Artificial Sequence: Synthetic polynucleotide"
atggctgccgatggttatcttccagattggctcgaggacaacctctctgagggcattcgcgagtggtgggacttgaaacctggagccccgaaacctaaagccaaccagcaaaagcaggacgacggccggggtctggtgcttcctggctacaagtacctcggacccttcaacggactcgacaagggggagcccgtcaacgcggcggacgcagcggccctcgagcacgacaaggcctacgaccagcagctcaaagcgggtgacaatccgtacctgcggtataaccacgccgacgccgagtttcaggagcgtctgcaagaagatacgtcttttgggggcaacctcgggcgagcagtcttccaggccaagaagcgggttctcgaaccttttggtctggttgaggaaggcgctaagacggctcctggaaagaaacgtccggtagagcagtcgccacaagagccagactcctcctcgggcatcggcaagacaggccagcagcccgctaaaaagagactcaattttggtcagactggcgactcagagtcagtccccgacccacaacctctcggagaacctccagcaacccccgctgctgtgggacctactacaatggcttcaggcggtggcgcaccaatggcagacaataacgaaggcgccgacggagtgggtaatgcctcaggaaattggcattgcgattccacatggctgggcgacagagtcatcaccaccagcacccgcacctgggccttgcccacctacaataaccacctctacaagcaaatctccagtgcttcaacgggggccagcaacgacaaccactacttcggctacagcaccccctgggggtattttgatttcaacagattccactgccacttttcaccacgtgactggcagcgactcatcaacaacaattggggattccggcccaagagactcaacttcaagctcttcaacatccaagtcaaggaggtcacgacgaacgatggcgtcacgaccatcgctaataaccttaccagcacggttcaagtcttctcggattcagagtaccaactgccgtacgtcctcggctctgcgcaccagggctgcctccctccgttcccggcggacgtgttcatgattccgcagtacggctacctaacgctcaacaatggcagccaggccgtgggacgttcatccttttactgcctggaatatttcccttctcagatgctgagaacgggcaacaactttaccttcagctacacctttgaggaagtgcctttccacagcagctacgcgcacagccagagcctggaccggctgatgaatcctctcatcgacctatacctgtattacctgaacagaactcaaaatcagtccggaagtgcccaaaacaaggacttgctgtttagccgtgggtctccagctggcatgtctgttcagcccaaaaactggctacctggaccctgttatcggcagcagcgcgtttctaaaacaaaaacagacaacaacaacagcaattttacctggactggtgcttcaaaatataacctcaatgggcgtgaatccatcatcaaccctggcactgctatggcctcacacaaagacgacgaagacaagttctttcccatgagcggtgtcatgatttttggaaaagagagcgccggaacttcaaatactgcattggacaatgtcatgatcacagatgaagaggaaattaaagccactaaccctgtggccaccgaaagatttgggaccgtggcagtcaatttccagagcagcagcacagaccccgcgaccggagatgtgcatgttatgggagccttacctggcatggtgtggcaagacagagacgtatacctgcagggtcccatttgggccaaaattcctcacacggatggacactttcacccgtctcctctcatgggcggctttggacttaagcacccgcctcctcaaatcctcatcaaaaacacgcctgttcctgcgaatcctccggcagagttttcggctacaaagtttgcttcattcatcacccagtactccacaggacaagtgagtgtggaaattgaatgggagctgcagaaagaaaacagcaagcgctggaatcccgaagtgcagtacacatccaattatgcaaaatctgccaacgttgatttcactgtggacaacaatggactttatactgagcctcgccccattggcacccgttaccttacccgtcccttg

SEQ ID NO: 686 - DNA, 2208 bp, Artificial Sequence
  source: /note="Description of Artificial Sequence: Synthetic polynucleotide"
atggctgccgatggttatcttccagattggctcgaggacagcctctctgagggcattcgcgagtggtgggacttgaaacctggagccccgaaacctaaagccaaccagcaaaagcaggacgacggccggggtctggtgcttcctggctacaagtacctcggacccttcaacggactcgacaagggggagcccgtcaacgcggcggacgcagcggccctcgagcacgacaaggcctacgaccagcagctcaaagcgggtgacaatccgtacctgcggtataaccacgccgacgccgagtttcaggagcgtctgcaagaagatacgtcttttgggggcaacctcgggcgagcagtcttccaggccaagaagcgggttctcgaaccttttggtctggttgaggaaggcgctaagacggctcctggaaagaaacgtccggtagagcagtcgccacaagagccagactcctcctcgggcatcggcaagacaggccagcagcccgctaaaaagagactcaattttggtcagactggcgactcagagtcagtccccgacccacaacctctcggagaacctccagcaacccccgctgctgtgggacctactacgatggcttcaggcggtggcgcaccaatggcagacaataacgaaggcgccgacggagtgggtaatgcctcaggaaattggcattgcgattccacatggctgggcgacagagtcatcaccaccagcacccgcacctgggccttgcccacctacaataaccacctctacaagcaaatctccagtgcttcaacgggggccagcaacgacaaccactacttcggctacagcaccccctgggggtattttgatttcaacagattccactgccacttttcaccacgtgactggcagcgactcatcaacaacaattggggattccggcccaagagactcaacttcaagctcttcaacatccaagtcaaggaggtcacgacgaacgatggcgtcacgaccatcgctaataaccttaccagcacggttcaagtcttctcggattcagagtaccaactgccgtacgtcctcggctctgcgcaccagggctgcctccctccgttcccggcggacgtgttcatgattccgcagtacggctacctaacgcccaacaatggcagccaggccgtgggacgttcatccttttactgcctggaatatttcccttctcagatgctgagaacgggcaacaactttaccttcagctacacctttgaggaagtgcctttccacagcagctacgcgcacagccagagcctggaccggctgatgaatcctctcatcgaccaataccagtattacctgaacagaactcaaaatcagtccggaagtgcccaaaacaaggacttgctgtttagccgtgggtctccagctggcatgtctgttcagcccaaaaactggctacctggaccctgttatcggcagcagcgcgtttctaaaacaaaaacagacaacaacaacagcaattttacctggactggtgcttcaaaatataacctcaatgggcgtgaatccatcatcaaccctggcactgctatggcctcacacaaagacgacgaagacaagttctttcccatgagcggtgtcatgatttttggaaaagagagcgccggagcttcaaatactgcattggacaatgtcatgatcacagatgaagaggaaattaaagccactaaccctgtggccaccgaaagatttgggaccgtggcagtcaatttccagagcagcagcacagaccccgcgaccggagatgtgcatgttatgggagccttacctggcatggtgtggcaagacagagacgtatacctgcagggtcccatttgggccaaaattcctcacacggatggacactttcacccgtctcctctcatgggcggctttggacttaagcacccgcctcctcaaatcctcatcaaaaacacgcctgttcctgcgaatcctccggcagagttttcggctacaaagtttgcttcattcatcacccagtactccacaggacaagtgagtgtggaaattgaatgggagctgcagaaagaaaacagcaagcgctggaatcccgaagtgcagtacacatccaattatgcaaaatctgccaacgttgatttcactgtggacaacaatggactttatactgagcctcgccccattggcacccgttaccttacccgtcccttg

SEQ ID NO: 687 - DNA, 2208 bp, Artificial Sequence; identical to SEQ ID NO: 678
  source: /note="Description of Artificial Sequence: Synthetic polynucleotide"

SEQ ID NO: 688 - DNA, 2205 bp, Artificial Sequence
  source: /note="Description of Artificial Sequence: Synthetic polynucleotide"
atggctgccgatggttatcttccagattggctcgaggacactctctctgaaggaataagacagtggtggaagctcaaacctggcccaccaccaccaaagcccgcagagcggcataaggacgacagcaggggtcttgtgcttcctgggtacaagtacctcggacccttcaacggactcgacaagggagagccggtcaacgaggcagacgccgcggccctcgagcacgacaaagcctacgaccggcagctcgacagcggagacaacccgtacctcaagtacaaccacgccgacgcggagtttcaggagcgccttaaagaagatacgtcttttgggggcaacctcggacgagcagtcttccaggcgaaaaagagggttcttgaacctctgggcctggttgaggaacctgttaagacggctccgggaaaaaagaggccggtagagcactctcctgtggagccagactcctcctcgggaaccggaaaggcgggccagcagcctgcaagaaaaagattgaattttggtcagactggagacgcagactcagtacctgacccccagcctctcggacagccaccagcagccccctctggtctgggaactaatacgatggctacaggcagtggcgcaccaatggcagacaataacgagggcgccgacggagtgggtaattcctcgggaaattggcattgcgattccacatggatgggcgacagagtcatcaccaccagcacccgaacctgggccctgcccacctacaacaaccacctctacaaacaaatttccagccaatcaggagcctcgaacgacaatcactactttggctacagcaccccttgggggtattttgacttcaacagattccactgccacttttcaccacgtgactggcaaagactcatcaacaacaactggggattccgacccaagagactcaacttcaagctctttaacattcaagtcaaagaggtcacgcagaatgacggtacgacgacgattgccaataaccttaccagcacggttcaggtgtttactgactcggagtaccagctcccgtacgtcctcggctcggcgcatcaaggatgcctcccgccgttcccagcagacgtcttcatggtgccacagtatggatacctcaccctgaacaacgggagtcaggcagtaggacgctcttcattttactgcctggagtactttccttctcagatgctgcgtaccggaaacaactttaccttcagctacacttttgaggacgttcctttccacagcagctacgctcacagccagagtctggaccgtctcatgaatcctctcatcgaccagtacctgtattacttgagcagaacaaacactccaagtggaaccaccacgcagtcaaggcttcagttttctcgggccggagcgagtgacattcgggaccagtctaggaactggcttcctggaccctgttaccgccagcagcgagtatcaaagacatctgcggataacaacaacagtgaatactcgtggactggagctaccaagtaccacctcaatggcagagactctctggtgaatccgggcccggccatggcaagccacaaggacgatgaagaaaagttttttcctcagagcggggttctcatctttgggaagcaaggctcagagaaaacaaatgtggacattgaaaaggtcatgattacagacgaagaggaaatcaggacaaccaatcccgtggctacggagcagtatggttctgtatctaccaacctccagagaggcaacagacaagcagctaccgcagatgtcaacacacaaggcgttcttccaggcatggtctggcaggacagagatgtgtaccttcaggggcccatctgggcaaagattccacacacggacggacattttcacccctctcccctcatgggtggattcggacttaaacaccctcctccacagattctcatcaagaacaccccggtacctgcgaatccttcgaccaccttcagtgcggcaaagtttgcttccttcatcacacagtactccacgggacaggtcagcgtggagatcgagtgggagctgcagaaggaaaacagcaaacgctggaatcccgaaattcagtacacttccaactacaacaagtctgttaatgtggactttactgtggacactaatggcgtgtattcagagcctcgccccattggcaccagatacctgactcgtaatctg

SEQ ID NO: 689 - protein, 736 aa, Artificial Sequence
  source: /note="Description of Artificial Sequence: Synthetic polypeptide"
MAADGYLPDWLEDNLSEGIREWWALKPGAPQPKANQQHQDNARGLVLPDYKYLGPGNGLDKGEPVNAADVAALEHDKAYDQQLKAGDNPYLKYNHADAEFQERLKEDTSFGGNLGRAVFQAKKRLLEPLGLVEEAAKTAPGKKRPVEQSPQEPDSSAGIGKSGAQPAKKRLNFGQTGDTESVPDPQPIGEPPAAPSGVGSLTMASGGGAPVADNNEGADGVGSSSGNWHCDSQWLGDGVITTSTRTWALPTYNNHLYKQISNSTSGGSSNDNAYFGYSTPWGYFDFNRFHCHFSPRDWQRLINNNWGFRPKRLNFKLFNIQVKEVTDNNGVKTIANNLTSTVQVFTDSDYQLPYVLGSAHEGCLPPFPADVFMIPQYGYLTLNDGSQAVGRSSFYCLEYFPSQMLRTGNNFQFSYEFENVPFHSSYAHSQSLDRLMNPLIDQYLHYLPKTINGSGQNQQTLKFSVAGPSNMAVQGRNYIPGPSYRQQRVSTTVTQNNNSEFAWPGASSWALNGRNSLMNPGPAMASYKEGEDSFFPLSGSLIFGKQGTGRDNVDADKVMITNEEEIKTTNPVATESYGQVATNHQSAQAQAQTGWVQNQGILPGMVWQDRDVYLQGPIWAKIPHTDGNFHPSPLMGGFGMKHPPPQTLIKNTPVPADPPTAFNKDKLNSFITQYSTGQVSVEIEWELQKENSKRWNPEIQYTSNYYKSNNVEFAVNTEGVYSEPRPIGTRYLTRNL

SEQ ID NO: 690 - protein, 736 aa, Artificial Sequence
  source: /note="Description of Artificial Sequence: Synthetic polypeptide"
MAADGYLPDWLEDNLSEGIREWWALKPGAPQPKANQQHQDNARGLVLPGYKYLGPGNGLDKGEPVNAADAAALEHDKAYDQQLKAGDNPYLKYNHADAEFQERLKEDTSFGGNLGRAVFQAKRRLLEPLGLVEEAAKTAPGKKRPVEQSPQEPDSSAGIGKSGAQPAKKRLNFGQTGDTESVPDPQPIGEPPAAPSGVGSLTMASGGGAPVADNNEGADGVGSSSGNWHCDSQWLGDRVITTSTRTWALPTYNNHLYKQISNSTSGGSSNDNAYFGYSTPWGYFDFNRFHCHFSPRDWQRLINNNWGFRPKRLNFKLFNIQIKEVTDNNGVKTIANNLTSTVQVFTDLDYQLPYVLGSAHEGCLPPFPADVFMIPQYGYLTLNDGSQAVGRSSFYCLEYFPSQMLRTGNNFQFSYEFENVPFHSSYAHSQSLDRLMNPLIDQYLHYLSKTINGSGQNQQTLKFSVAGPSNMAVQGRNYIPGPSYRQQRVSTTVTQNNNSEFAWPGASSWALNGRNSLMNPGPAMASYKEGEDSFFPLSGSLIFGKQGTGRDNVDADKVMITNEEEIKTTNPVATESYGQVATNHQSAQAQAQTGWVQNQGILPGMVWQDRDVYLQGPIWAKIPHTDGNFHPSPLMGGFGMKHPPPQTLIKNTPVPADPPTAFNKDKLNSFITQYSTGQVSVEIEWELQKENSKRWNPEIQYTSNYYKSNNVEFAVNTEGVYSEPRPIGTRYLTRNL

SEQ ID NO: 691 - protein, 736 aa, Artificial Sequence
  source: /note="Description of Artificial Sequence: Synthetic polypeptide"
MAADGYLPDWLEDNLSEGIREWWALKPGAPQPKANQQHQDNARGLVLPGYKYLGPGNGLDKGEPVSAADAAALEHDKAYDQQLKAGDNPYLKYNHADAEFQERLKEDTSFGGNLGRAVFQAKKRLLEPLGLVEEAAKTAPGKKRPVEQSPQEPDSSAGIGKSGAQPAKKRLNFGQTGDTESVSDPQPIGEPPAAPSGVGSLTMASGGGAPVADNNEGADGVGSSSGNWHCDSQWLGDRVITTSTRTWALPTYNNHLYKQISNSTSGGSSNDNAYFGYSTPWGYFDFNRFHCHFSPRDWQRLINNNWGFRPKRLNFKLFNIQVKEVTDNNGVKTIANNLTSTVQVFTDSDYQLPYVLGSAHEGCLPPSPADVFMIPQYGYLTLNDGSQAVGRSSFYCLEYFPSQMLRTGNNFQFSYEFENVPFHSSYAHSQSLDRLMNPLIDQYLHYLSKTINGSGQNQQTLKFSVAGPSNMAVQGRNYIPGPSYRQQRVSTTVTQNNNSEFAWPGASSWALNGRNSLMNPGPAMASYKEGEDSFFPLSGSLIFGKQGTGRDDVDADKVIITNEEEIKTTNPVATESYGQVATNHQSAQAQAQTGWVQNQGILPGMVWQDRDVYLQGPIWAKIPHTDGNFHPSPLMGGFGMKHPPPQTLIKNTPVPADPPTAFNKDKLNSFITQYSTGQVSVEIEWELQKENSKRWNPEIQYTSNYYKSNNVEFAVNTEGVYSEPRPIGTRYLTRNL

SEQ ID NO: 692 - protein, 736 aa, Artificial Sequence
  source: /note="Description of Artificial Sequence: Synthetic polypeptide"
MAADGYLPDWLEDNLSEGIREWWALKPGAPQPKANQQHQDNARGLVLPGYKYLGPGNGLDKGEPVNAADAAALEHDKAYDQQLKAGDNPYLKYNHAGAEFQERLKEDTSFGGNLGRAVFQAKKRLLEPLGLVEEAAKTAPGKKRPVEQSPQEPDSSAGIGKSGAQPAKKRLNFGQTGDTESVPDPQPIGEPPAAPSGVGSLTMASGGGAPVADNNEGAGGVGSSSGNWHCDSQWLGDRVVTTSTRTWALPTYNNHLYKQISNSTSGGSSNDNAYFGYSTPWGYFDFNRFHCHFSPRDWQRLINNNWGFRPKRLNFKLFNIQVKEVTDNNGVKTIANNLTSTVQVFTDSDYQLPYVLGSAHGGCLPPFPADVFMIPQYGYLTLNDGSQAVGRSSFYCLEYFPSQMLRTGNNFQFSYEFENVPFHSSYAHSQSLDRLMNPLIDQYLHYLSKTINGSGQNQQTLKFSVAGPSNMAVQGRSYIPGPSYRQQRVSTTVTQNNNSEFAWPGASSWALNGRNSLMNPGPAMASYKEGEDSFFPLSGSLIFGKQGTGRDNVDADKVMITNEEEIKTTNPVATESYGQVATNHQSAQAQAQTGWVQNQGILPGMVWQDRDVYLQGPIWAKIPHTDGNFHPSPLMGGFGMKHPPPQTLIKNTPVPADPPTAFNKDKLNSFITQYSTGQVSVEIEWELQKENSKRWNPEIQYTSNYYKSNNVEFAVNTEGVYSEPRPIGTRYLTRNL

SEQ ID NO: 693 - protein, 736 aa, Artificial Sequence
  source: /note="Description of Artificial Sequence: Synthetic polypeptide"
MAADGYLPDWLEDNLSEGIREWWALKPGAPQPKANQQHQDNARGLVLPGYKYLGPGNGLDKGEPVNAADAAALEHDKAYDQQLKAGDNPYLKYNHADAEFQERLKEDTSFGGNLGRAVFQAKKRLLEPLGLVEEAAKTAPGKKRPVEQSPQEPDSSAGIGKSGAQPAKKRLNFGQTGDTESVPDPQPIGEPPAAPSGVGSLTMASGGGAPVADNNEGADGVGSSSGNWHCDSQWLGDRVVTTSTRTWALPTYNNHLYKQISNSTSGGSSNDNAYFGYSTPWGYFDFNRFHCHFSPRDWQRLINNNWGFRPKRLNFKLFNIQVKEVTDNNGVKTIANNLTSTVQVFTDSDYQLPYVLGSAHEGCLPPFPADVFMIPQYGYLTLNDGSQAVGRSSFYCLEYFPSQMLRTGNNFQFSYEFENVPFHSSHAHSQSLDRLMNPLIDQYLHYLSKTINGSGQNQQTLKFSVAGHSNMAVQGRNYIPGPSYRQQRVSTTVTQNNNSEFAWPGASSWALNGRNSLMNPGPAMASYKEGEDSFFPLSGSLIFGKQGTGRDNVDADKVMITNEEEIKTTNPVATESYGQVATNHQSAQAQAQTGWVQNQGILPGMVWQDRDVYLQGPIWAKIPHTDGNFHPSPLMGGFGMKHPPPQTLIKNTPVPADPPTAFNKDKLNSFITQYSTGQVSVEIGWELQKENSKRWNPEIQYTSNYYKSNNVEFAVNTEGVYSEPRPIGTRYLTRNL

SEQ ID NO: 694 - protein, 736 aa, Artificial Sequence
  source: /note="Description of Artificial Sequence: Synthetic polypeptide"
MAADGYLPDWLEDNLSEGIREWWALKPGAPQPKANQQHQDNARGLVLPGYKYLGPGNGLDKGEPVNAADAAALEHDKAYDQQLKAGDNPYLKYNHADAEFQERLKEDTSFGGNLGRAVFQAKKRLLEPLGLVEEAAKTAPGKKRPVEQSPQEPDSSAGIGKSGAQPAKKRLNFGQTGDTESVPDPQPIGEPPAAPSGVGSLTMASGGGAPVADNNEGADGVGSSSGNWHCDSQWLGDRVITTSTRTWALPTYNNRLYKQISNSTSGGSSNDNAYFGYSTPWGYFDFNRFHCHFSPRDWQRLINNNWGFRPKRLNFKPFNIQVKEVTDNNGVKTIANNLTSTVQVFTDSDYQLPYVLGSAHEGCLPPFPADVFMIPQYGYLTLNDGSQAVGRSSFYCLEYFPSQMLRTGNNFQFSYEFENVPFHSSYAHSQSLDRLMNPLIDQYLHYLSKTINGSGQNQQTLKFSVAGPSNMAVQGRNYIPGPSYRQQRVSTTVTQNNNSEFAWPGASSWALNGRNSLMNPGPAMASYKEGEDSFFPLSGSLIFGKQGTGRDNVDADKVMITNEEEIKTTNPVATESYGQVATNHQSAQAQAQTGWVQNQGILPGMVWQDRDVYLQGPIWAKIPHTDGNFHPSPLMGGFGMKHPPPQTLIKNTPVPADPPTAFNKDKLNSFITQYSTGQVSVEIEWELQKENSKRWNPEIQYTSNYYKSNNVEFAVNTEGVYSEPRPIGTRYLTRNL

SEQ ID NO: 695 - protein, 736 aa, Artificial Sequence
  source: /note="Description of Artificial Sequence: Synthetic polypeptide"
MAADGYLPDWLEDNLSEGIREWWALKPGAPQPKANQQHQDNARGLVLPGYKYLGPGNGLDKGEPVNAADAAALEHDKAYDQQLKAGDNPYLKYNHADAEFQERLKEDTSFGGNLGRAVFQAKKRLLEPLGLVEEAAKTAPGKKRPVEQSPQEPDSSAGIGKSGAQPAKKRLNFGQTGDTESVPDPQPIGEPPAAPSGVGSLTMASGGGAPVADNNEGADGVGSSSGNWHCDSQWLGDRVITTSTRTWALPTYNNHLYKQISNSTSGGSSNDNAYFGYSTPWGYFDFNRFHCHFSPRDWQRLINNNWGFRPKRLNFKLFNIQVKEVTDNNGVKTIANNLTSTVQVFTDSDYQLPYVLGSAHEGCLPPFPADVFMIPQYGYLTLNDGSQAVGRSSFYCLEYFPSQMLRTGNNFQFSYEFENVPFHSSYAHSQSLDRLMNPLIDQYLHYLSKTINGSGQNQQTLKFSVAGPSNMAVQGRNYIPGPSYRQQRVSTTVTQNNNSEFAWPGASSWALNGRNSLMNPGPAMASYKEGEDSFFPLSGSLIFGKQGTGRDNVDADKVMITNEEEIKTTNPVATESYGQVATNHQSAQAQAQTGWVQNQGILPGMVWQDRDVYLQGPIWAKIPHTDGNFHPSPLMGGFGMKHPPPQTLIKNTPVPADPPTAFNKDKLNSFITQYSTGQVSVEIEWELQKENSKRWNPEIQYTSNYYKSNNVEFAVNTEGVYSEPRPIGTRYLTRNL

SEQ ID NO: 696 - protein, 736 aa, Artificial Sequence; identical to SEQ ID NO: 695
  source: /note="Description of Artificial Sequence: Synthetic polypeptide"

SEQ ID NO: 697 - protein, 736 aa, Artificial Sequence
  source: /note="Description of Artificial Sequence: Synthetic polypeptide"
MAADGYLPDWLEDNLSEGIREWWDLKPGAPKPKANQQKQDDGRGLVLPGYKYLGPFNGLDKGEPVNAADAAALEHDKAYDQQLKAGDNPYLRYNHADAEFQERLQEDTSFGGNLGRAVFQAKKRVLEPFGLVEEGAKTAPGKKRPVEQSPQEPDSSSGIGKSGQQPAKKRLNFGQTGDSESVPDPQPLGEPPATPAALGPTTMASGGGAPMADNNEGADGVGNASGNWHCDSTWLGDRVITTSTRTWALPTYNNHLYKQISSASTGASNDNHYFGYSTPWGYFDFNRFHCHFSPRDWQRLINNNWGFRPKRLNFKLFNIQVKEVTTNDGVTTIANNLTSTVQVFSDSEYQLPYVLGSAHQGCLPPFPADVFMIPQYGYLTLNNGSKAVGRSSFYCLEYFPSQMLRTGNNFTFSYTFEEVPFHSSYAHSQSLDRLMNPLIDQYLYYLNRTQNQSGSAQNKDLLFSRGSPAGMSVQPKNWLPGPCYRQQRVSKTKTDNNNSNFTWTGASKYNLNGRESIINPGTAMASHKDDEDKFFPMSGVMIFGKESAGASNTALDNVMITDEEEIKATNPVATERFGTVAVNFQSSSTDPATGDVHVMGALPGMVWQDRDVYLQGPIWAKIPHTDGHFHPSPLMGGFGLKHPPPQILIKNTPVPANPPAEFSATKFASFITQYSTGQVSVEIEWELQKENSKRWNPEVQYTSNYAKSANVDFTVDNNGLYTEPRPIGTRYLTRPL

SEQ ID NO: 698 - protein, 736 aa, Artificial Sequence
  source: /note="Description of Artificial Sequence: Synthetic polypeptide"
MAADGYLPDWLEDNLSEGIREWWDLKPGAPKPKANQQKQDDGRGLVLPGYKYLGPFNGLDKGEPVNAADAAALEHDKAYDQQLKAGDNPYLRYNHADAEFQERLQEDTSFGGNLGRAVFQAKKRVLEPLGLVEEGAKTAPGKKRPVEQSPQEPDSSSGIGKTGQQPAKKRLNFGQTGDSESVPDPQPLGEPPATPAAVGPTTMASGGGAPMADNNEGADGVGNASGNWHCDSTWLGDRVITTSTRTWALPTYNNHLYKQISSTSTGASNDNHYFGYSTPWGYFDFNRFHCHFSPRDWQRLINNNWGFRPKRLNFKLFNIQVKEVTTNDGVTTIANNLTSTVQVFSDSEYQLPYVLGSAHQGCLPPFPADVFMIPQYGYLTLNNGSQAVGRSSFYCLEYFPSQMLRTGNNFTFSYTFEEVPFHSSYAHSQSLDRLMNPLIDQYLYYLNRTQNQSGSAQNKDLLFSRGSPAGMSVQPKNWLPGPCYRQQRVSKTKTDNNNSNFTWTGASKYNLNGRESIINPGTAVASHKDDEDKFFPMSGVMIFGKESAGASNTALDNVMITDEEEIKATNPVATERFGTVAVNFQSSSTDPATGDVHAMGALPGMVWQDRDVYLQGPIWAKIPHTDGHFHPSPLMGGFGLKNPPPQILIKNTPVPANPPAEFSATKFASFITQYSTGQVSVEIEWELQKENSKRWNPEVQYTSNYAKSANVDFTVDNNGLYTEPRPIGTRYLTRPL

SEQ ID NO: 699 - protein, 736 aa, Artificial Sequence
  source: /note="Description of Artificial Sequence: Synthetic polypeptide"
MAADGYLPDWLEDNLSEGIREWWALKPGAPQPKANQQHQDNARGLVLPGYKYLGPGNGLDKGEPVNAADAAALEHDKAYDQQLKAGDNPYLKYNHADAEFQERLKEDTSFGGNLGRAVFQAKKRLLEPLGLVEEAAKTAPGKKRPVEQSPQEPDSSAGIGKSGAQPAKKRLNFGQTGDTESVPDPQPIGEPPAAPSGVGSLTMASGGGAPVADNNEGADGVGSSSGNWHCDSQWLGDRVITTSTRTWALPTYNNHLYKQISNSTSGGSSNDNAYFGYSTPWGYFDFNRFHCHFSPRDWQRLINNNWGFRPKRLNFKLFNIQVKEVTDNNGVKTIANNLTSTVQVFTDSDYQLPYVLGSAHEGCLPPFPADVFMIPQYGYLTLNDGSQAVGRSSFYCLEYFPSQMLRTGNNFQFGYEFENVPFHSSYAHSQSLDRLMNPLIDQYLYYLSKTINGSGQNQQTLKFSVAGPSNMAVQGRNYIPGPSYRQQRVSTTVTQNNNSEFAWPGASSWALNGRNSLMNPGPAMASHKEGEDRFFPLSGSLIFGKQGTGRDNVDADKVMITNEEEIKTTNPVATESYGQVATNHQSAQAQAQTGWVQNQGILPGMVWQDRDVYLQGPIWAKIPHTDGNFHPSPLMGGFGMKHPPPQILIKNTPVPADPPTAFNKDKLNSFITQYSTGQVSVEIEWELQKENSKRWDPEIQYTSNYYKSNNVEFAVNTEGVYSEPRPIGTRYLTRNL

SEQ ID NO: 700 - protein, 736 aa, Artificial Sequence
  source: /note="Description of Artificial Sequence: Synthetic polypeptide"
MAADGYLPDWLEDNLSEGIREWWALKPGAPQPKANQQHQDNARGLVLPGYKYLGPGNGLDKGEPVNAADAAALEHDKAYDQQLKAGDNPYLKYNHADAEFQERLKEDTSFGGNLGRAVFQAKKRLLEPLGLVEEAAKTAPGKKRPVEQSPQEPDSSAGIGKSGAQPAKKRLNFGQTGDTESVPDPQPIGEPPAAPSGVGSLTMASGGGAPVADNNEGADGVGSSSGNWHCDSQWLGDRVITTSTRTWALPTYNNHLYKQISNSTSGGSSNDNAYFGYSTPWGYFDFNRFHCRFSPRDWQRLINNNWGFRPKRLNFKLFNIQVKEVTDNNGVKTIANNLTSTVQVFTDSDYQLPYVLGSAHEGCLPPFPADVFMIPQYGYLTLNDGSQAVGRSSFYCLEYFPSQMLRTGNNFQFSYEFENVPFHSSYAHSQSLDRLMNPLIDQYLYYLSKTINGSGQNQQTLKFSVAGPSNMAVQGRNYIPGPSYRQQRVSTTVTQNNNSEFAWPGASSWALNGRNSLMNPGPAMASHKEGEDRFFPLSGSLIFGKQGTGRDNVDADKVMITNEEEIKTTNPVATESYGQVATNHQSAQAQAQTGWVQNQGILPGMVWQDRDVYLQGPIWAKIPHTDGNFHPSPLMGGFGMKHPPPQILIKNAPVPADPPTAFNKDKLNSFITQYSTGQVSVEIEWELQKENSKRWNPEIQYTSNYYKSNNVEFAVNTEGVYSEPRPIGTRYLTRNL

SEQ ID NO: 701 - protein, 736 aa, Artificial Sequence
  source: /note="Description of Artificial Sequence: Synthetic polypeptide"
MAADGYLPDWLEDNLSEGIREWWALKPGAPQPKANQQHQDNARGLVLPGYKYLGPGNGLDKGEPVSAADAAALEHDKAYDQQLKAGDNPYLKYNHADAEFQERLKEDTSFGGNLGRAVFQAKKRLLEPLGLVEEAAKTAPGKKRPVEQSPQEPDSSAGIGKSGAQPAKKRLNFGQTGDTESVPDPQPIGEPPAAPSGVGSLTMASGGGAPVADNNEGADGVGSSSGNWHCDSQWLGDRVITTSTRTWALPTYNNHLYKQISNSTSGGSSNDNAYFGYSTPWGYFDFNRFHCHFSPRDWQRLINNNWGFRPKRLNFKLFNIQVKEVTDNNGVKTIANNLTSTVQVFTDSDYQLPYVLGSAHEGCLPPFPADVFMIPQYGYLTLNDGSQAVGRSSFYCLEYFPSQMLRTGNNFQFSYEFENVPFHSSYAHSQSLDRLMNPLIDQYLYYLSKTINGSGQNQQTLKFSVAGPSNMAVQGRNYIPGPSYRQQRVSTTVTQNNNSEFAWPGASSWALNGRNSLMNPGPAMASHKEGEDRFFPLSGSLIFGKQGTGRDNVDADKVMITNEEEIKTTNPVATESYGQVATNHQSAQAQAQTGWVQNQGILPGMVWQDRDVYLQGPIWAKIPHTDGNFHPSPLMGGFGMKHPPPQILIKNTPVPADPPTAFNKDKLNSFITQYSTGQVSVEIEWELQKENSKRWNPEIQYTSNYYKSNNVEFAVNTEGVYSEPRPIGTRYLTRNL

SEQ ID NO: 702 - protein, 736 aa, Artificial Sequence
  source: /note="Description of Artificial Sequence: Synthetic polypeptide"
MAADGYLPDWLEDNLSEGIREWWALKPGAPQPKANQQHQDNARGLVLPGYKYLGPGNGLDKGEPVNAADAAALEHDKAYDQQLKAGDNPYLKYNHADAEFQERLKEDTSFGGNLGRAVFQAKKRLLEPLGLVEEAAKTAPGKKRPVEQSPQEPDSSAGIGKSGAQPAKKRLNFGQTGDTESVPDPQPIGEPPAAPSGVGSLTMASGGGAPVADNNEGADGVGSSSGNWHCDSQWLGDRVITTSTRTWALPTYNNHLYKQISNSTSGGSSNDNAYFGYSTPWGYFDFNRFHCHFSPRDWQRLINNNWGFRPKRLNFKLFNIQVKEVTDNNGVKTIANNLTSTVQVFTDSDYQLPYVLGSAHEGCLPPFPADVFMIPQYGYLTLNDGSQAVGRSSFYCLEYFPSQMLRTGNNFQFSYEFENVPFHSSYAHSQSLDRLMNPLIDQYLYYLSKTINGSGQNQQTLKFSVAGPSNTAVQGRNYIPGPSYRQQRVSTTVTQNNNSEFAWPGASSWALNGRNSLMNPGPAMASHKEGEDRFFPLSGSLIFGKQGTGRDNVDADKVMITNEEEIKTTNPVATESYGQVATNHQSAQAQAQTGWVQNQGILPGMVWQDRDVYLQGPIWAKIPHTDGNFHPSPLMGGFGMKHPPPQILIKNTPVPADPPTAFNKDKLNSFITQYSTGQVSVEIEWELQKENSKRWNPEIQYTSNYYKSNNVEFAVNTEGVYSEPRPIGTRYLTRNL

SEQ ID NO: 703 - protein, 736 aa, Artificial Sequence
  source: /note="Description of Artificial Sequence: Synthetic polypeptide"
MAADGYLPDWLEDNLSEGIREWWALKPGAPQPKANQQHQDNARGLVLPGYKYLGPGNGLDKGEPVNAADAAALEHDKAYDQQLKAGDNPYLKYNHADAEFQERLKEDTSFGGNLGRAVFQAKKRLLEPLGLVEEAAKTAPGKKRPVEQSPQEPDSSAGIGKSGAQPAKKRLNFGQTGDTESVPDPQPIGEPPAAPSGVGSLTMASGGGAPVADNNEGADGVGSSSGNWHCDSQWLGDRVITTSTRTWALPTYNNHLYKQISNSTSGGSSNDNAYFGYSTPWGYFDFNRFHCHFSPRDWQRLINNNWGFRPKRLNFKLFNIQVKEVTDNNGVKTIANNLTSTVQVFTDSDYQLPYVLGSAHEGCLPPFPADVFMIPQYGYLTLNDGSQAVGRSSFYCLEYFPSQMLRTGSNFQFSYEFENVPFHSSYAHSQSLDRLMNPLIDQYLYYLSKTINGSGQNQQTLKFSVAGPSNMAVQGRNYIPGPSYRQQRVSTTVTQNNNSEFAWPGASSWALNGRNSLMNPGPAMASHKEGEDRFFPLSGSLIFGKQGTGRDNVDADKVMITNEEEIKTTNPAATESYGQVATNHQSAQAQAQTGWVQNQGILPGMVWQDRDVYLQGPIWAKIPHTDGNFHPSPLMGGFGMKHPPPQILIKNTPVPADPPTAFNKDKLNSFITQYSTGQVSVEIEWELQKENSKRWNPEIQHTSNYYKSNNVEFAVNTEGVYSEPRPIGTRYLTRNL

SEQ ID NO: 704 - protein, 736 aa, Artificial Sequence
  source: /note="Description of Artificial Sequence: Synthetic polypeptide"
MAADGYLPDWLEDNLSEGIREWWALKPGAPQPKANQQHQDNARGLVLPGYKYLGPGNGLDKGEPVNAADAAALEHDKAYDQQLKAGDNPYLKYNHADAEFQERLKEDTSFGGNLGRAVFQAKKRLLEPLGLVEEAAKTAPGKKRPVEQSPQEPDSSAGIGKSGAQPAKKRLNFGQTGDTESVPDPQPIGEPPAAPSGVGSLTMASGGGAPVADNNEGADGVGSSSGNWHCDSQWLGDRVITTSTRTWALPTYNNHLYKQISNSTSGGSSNDNAYFGYSTPWGYFDFNRFHCHFSPRDWQRLINNNWGFRPKRLNFRLFNIQVKEVTDNNGVKTIANNLTSTVQVFTDSDYQLPYVLGSAHEGCLPPFPADVFMIPQYGYLTLNDGSQAVGRSSFYCLEYFPSQMLRTGNNFQFSYEFENVPFHSSYAHSQSLDRLMNPLIDQYLYYLSKTINGSGQNQQTLKFSVAGPSNMAVQGRNYIPGPSYRQQRVSTTVTQNNNSEFAWPGASSWALNGRNSLMNPGPAMASHKEGEDRFFPLSGSLIFGKQGTGRDNVDADKVMITNEEEIKTTNPVATESYGQVATNHQSAQAQAQTGWVQSQGILPGMVWQDRDVYLQGPIWAKIPHTDGNFHPSPLMGGFGMKHPPPQILIKNTPVPADPPTAFNKDKLNSFITQYSTGQVSVEIEWELQKENSKRWNPEIQYTSNYYKSNNVEFAVNTEGVYSEPRPIGTRYLTRNL

SEQ ID NO: 705 - protein, 735 aa, Artificial Sequence
  source: /note="Description of Artificial Sequence: Synthetic polypeptide"
MAADGYLPDWLEDNLSEGIREWWALKPGAPQPKANQQHQDNARGLVLPGYKYLGPGNGLDKGEPVNAADAAALEHDKAYDQQLKAGDNPYLKYNHADAEFQERLKEDTSFGGNLGRAVFQAKKRLLEPLGLVEEAAKTAPGKKRPVEQSPQEPDSSAGIGKSGAQPAKKRLNFGQTGDTESVPDPQPIGEPPAAPSGVGSLTMASGGGAPVADNNEGADGVGSSSGNWHCDSQWLGDRVITTSTRTWALPTYNNHLYKQISNSTSGGSSNDNAYFGYSTPWRYFDFNRFHCHFSPRDWQRLINNWGFRPKRLNFKLFNIQVKEVTDNNGVKTIANNLTSTVQAFTDSDYQLPYVLGSAHEGCLPPFPADVFMIPQYGYLTLNDGSQAVGRSSFYCLEYFPSQMLRTGNNFQFSYEFENVPFHSSYAHSQSLDRLMNPLIDQYLYYLSKTINGSGQNQQTLKFSVAGPSNMAVQGRNYIPGPSYRQQRVSTTVTQNNNSEFAWPGASSWALNGRNSLMNPGPAMASHKEGEDRFFPLSGSLIFGKQGTGRDNVDADKVMITNEEEIKTTNPVATESYGQVATNHQSAQAQAQTGWVQNQGILPGMVWQDRDVYLQGPIWAKIPHTDGNFHPSPLMGGFGMKHPPPQILIKNTPVPADPPTAFNKDELNSFITQYSTGQVSVEIEWELQKENSKRWNPEIQYTSNYYKSNNVEFAVNTEGVYSEPRPIGTRYLTRNL

SEQ ID NO: 706 - protein, 735 aa, Artificial Sequence
  source: /note="Description of Artificial Sequence: Synthetic polypeptide"
MAADGYLPDWLEDNLSEGIREWWALKPGAPQPKANQQHQDNARGLVLPGYKYLGPGNGLDKGEPVNAADAAALEHDKAYDQQLKAGDNPYLKYNHADAEFQERLKEDTSFGGNLGRAVFQDKKRLLEPLGLVEEAAKTAPGKKRPVEQSPQEPDSSAGIGKSGAQPAKKRLNFGQTGDTESVPDPQPIGEPPAAPSGVGSLTMASGGGAPVADNNEGADGVGSSSGNWHCDSQWLGDRVITTSTRTWALPTYNNHLYKQISNSTSGGSSNDNAYFGYSTPWGYFDFNRFHCHFSPRDWQRLINNWGFRPKRLNFKLFNIQVKEVTDNNGVKTIANNLTSTVQVFTDSDYQLPYVLGSAHEGCLPPFPADVFMIPQYGYLTLNDGSQAVGRSSFYCLEYFPSQMLRTGNNFQFSYEFENVPFHSSYAHSQSLDRLMNPLIDQYLYYLSKTINGSGQNQQTLKFSVAGPSNMAVQGRNYIPGPSYRQQRVSTTVTQNNNSEFAWPGASSWALNGRNSLMNPGPAMASHKEGEDRFFPLSGSLIFGKQGTGRDNVDADKVMITNEEEIKTTNPVATESYGQVATNHQSAQAQAQTGWVQNQGILPGMVWQDRDVYLQGPIWAKIPHTDGNFHPSPLMGGFGMKHPPPQILIKNTPVPADPPTAFNKDKLNSFITQYSTGQVSVEIEWELQKENSKRWNPEIQYTSNYYKSNNVEFAVNTEGVYSEPRPIGTRYLTRNL

SEQ ID NO: 707 - protein, 736 aa, Artificial Sequence
  source: /note="Description of Artificial Sequence: Synthetic polypeptide"
MAADGYLPDWLEDNLSEGIREWWALKPGAPQPKANQQHQDNARGLVLPGYKYLGPGNGLDKGEPVNAADAAALEHDKAYDQQLKAGDNPYLKYNHADAEFQERLKEDTSFGGNLGRAVFQAKKRLLEPLGLVEEAAKTAPGKKRPVEQSPQEPDSSAGIGKSGAQPAKKRLNFGQTGDTESVPDPQPIGEPPAAPSGVGSLTMASGGGAPVADNNEGADGVGSSSGNWHCDSQWLGDRAITTSTRTWALPTYNNHLYKQISNSTSGGSSNDNAYFGYSTPWGYFDFNRFHCHFSPRDWQRLINNNWGFRPKRLNFKLFNIQVKEVTDNNGVKTIANNLTSTVQVFTDSDYQLPYVLGSAHEGCLPPFPADVFMIPQYGYLTLNDGSQAVGRSSFYCLEYFPSQMLRTGNNFQFSYEFENVPFHSSYAHSQSLDRLMNPLIDQYLYYLSKTINGSGQNQQTLKFSVAGPSNMAVQGRNYIPGPSYRQQRVSTTVTQNNNSEFAWPGASSWALNGRNSLMNPGPAMASHKEGEDRFFPLSGSLIFGKQGTGRDNVDADKVMTTNEEEIKTTNPVATESYGQVATNHQSAQAQAQTGWVQNQGILPGMVWQDRDVYLQGPIWAKIPHTDGNFHPSPLMGGFGMKHPPPQILIKNTPVPADPPTAFNKDKLNSFITQYSTGQVSVEIEWELQKENSKRWNPEIQYTSNYYKSNNVEFAVNTEGVYSEPRPIGTRYLTRNL

SEQ ID NO: 708 - protein, 736 aa, Artificial Sequence
  source: /note="Description of Artificial Sequence: Synthetic polypeptide"
MAADGYLPDWLEDNLSEGIREWWALKPGAPQPKANQQHQDNARGLVLPGYKYLGPGNGLDKGEPVNAADAAALEHDKAYDQQLKAGDNPYLKYNHADAEFQERLKEDTSFGGNLGRAVFQTKKRLLEPLGLVEEAAKTAPGKKRPVEQSPQEPGSSAGIGKSGAQPAKKRLNFGQTGDTESVPDPQPIGEPPAAPSGVGSLTMASGGGAPVADNNEGADGVGSSSGNWHCDSQWLGDRVITTSTRTWALPTYNNHLYKQISNSTSGGSSNDNAYFGYSTPWGYFDFNRFHCHFSPRDWQRLINNNWGFRPKRLNFKLFNIQVKEVTDNNGVKTIANNLTSTVQVFTDSDYQLPYVLGSAHEGCLPPFPADVFMIPQYGYLTLNDGSQAVGRSSFYCLEYFPSQMLRTGNNFQFSYEFENVPFHSSYAHSQSLDRLMNPLIDQYLHYLSKTINGSGQNQQTLKFSVAGPSNMAVQGRNYIPGPSYRQQRVSTTVTQNNNSEFAWPGASSWALNGRNSLMNPGPAMASHKEGEDRFFPLSGSLIFGKQGTGRDNVDADKVMITNEEEIKTTNPVATESYGQVATNHQSAQAQAQTGWVQNQGILPGMVWQDRDVYLQGPIWAKIPHTDGNFHPSPLMGGFGMKHPPPQILIKNTPVPADPPTAFNKDKLNSFITQYSTGQVSVEIEWELQKENSKRWNPEIQYTSNYYKSNNVEFAVNTEGVYSEPRPIGTRYLTRNL

SEQ ID NO: 709 - protein, 736 aa, Artificial Sequence
  source: /note="Description of Artificial Sequence: Synthetic polypeptide"
MAADGYFPDWLEDNLSEGIREWWALKPGAPQPKANQQHQDNARGLVLPGYKYLGPGNGLDKGEPVNAADAAALEHDKAYDQQLKAGDNPYLKYNHADAEFQERLKEDTSFGGNLGRAVFQAKKRLLEPLGLVEEAAKTAPGKKRPVEQSPQEPDSSAGIGKSGAQPAKKRLNFGQTGDTESVPDPQPIGESPAAPSGVGSLTMASGGGAPVADNNEGADGVGSSSGNWHCDSQWLGDRVITTSTRTWALPTYNNHLYKQISNSTSGGSSNDNAYFGYSTPWGYFDFNRFHCHFSPRDWQRLINNNWGFRPKRLNFKLFNIQVKEVTDNNGVKTIANNLTSTVQVFTDSDYQLPYVLGSAHEGCLPPFPADVFMIPQYGYLTLNDGSQAVGRSSFYCLEYLPSQMLRTGNNFQFSYEFENVPFHSSYAHSQSLDRLMNPLIDQYLHYLSKTINGSGQNQQTLKFSVAGPSNMAVQGRNYIPGPSYRQQRVSTTVTQNNNSEFAWPGASSWALNGRNSLMNPGPAVASHKEGEDRFFPLSGSLIFGKQGTGRDNVDADKVMITNEEEIKTTNPVATESYGQVATNHQSAQAQAQTGWVQNQGILPGMVWQDRDVYLQGPIWAKIPHTDGNFHPSPLMGGFGMKHPPPQILIKNTPVPADPPTAFNKDKLNSFITQYSTGQVSVEIEWELQKENSKRWNPEIQYTSNYYKSNNVEFAVNTEGVYSEPRPIGTRYLTRNL

SEQ ID NO: 710 - protein, 736 aa, Artificial Sequence
  source: /note="Description of Artificial Sequence: Synthetic polypeptide"
MAADGYLPDWLEDNLSEGIREWWALKPGAPQPKANQQHQDNARGLVLPGYKYLGPGNGLDKGEPVNAADAAALEHDKAYDQQLKAGDNPYLKYNHADAEFQERLKEDTSFGGNLGRAVFQAKKRLLEPLGPVEEAAKTAPGKKRPVEQSPQEPDSSAGIGKSGAQPAKKRLNFGQTGDTESVPDPQPIGEPPAAPSGVGSLTMASGGGAPVADNNEGADGVGSSSGNWHCDSQWLGDRVITTSTRTWALPTYNNHLYKQISNSTSGGSSNDNAYFGYSTPWGYFDFNRFHCHFSPRDWQRLINNNWGFRPKRLNFKLFNIQVKEVTDNNGVKTIANNLTSTVQVFTDSDYQLPYVLGSAHEGCLPPFPADVFMIPQYGYLTLNDGSQAVGRSSFYCLEYFPSQMLRTGNNFQFSYEFENVPFHSSYAHSQSLDRLMNPLIDQYLYYLSKTINGSGQNQQTLKFSVAGPSNMAVQGRNYIPGPSYRQQRVSTTVTQNNNSEFAWPGASSWALNGRNSLMNPGPAMASHKEGEDRFFPLSGSLIFGKQGTGRDNVDADKVMITNEEEIKTTNPVATESYGQAATNHQSAQAQAQTGWVQNQGILPGMVWQDRDVYLQGPIWAKIPHTDGNFHPSPLMGGFGMKHPPPQILIKNTPVPADPPTAFNKDKLNSFITQYSTGQVSVEIEWELQKENSKRWNPEIQYTSNYYKSNNVEFAVNTEGVYSEPRPIGTRYLTRNL

SEQ ID NO: 711 - protein, 736 aa, Artificial Sequence
  source: /note="Description of Artificial Sequence: Synthetic polypeptide"
MAADGYLPDWLEDNLSEGIREWWALKPGAPQPKANQQHQDNARGLVLPGYKYLGPGNGLDKGEPVNAADAAALEHDKAYDQQLKAGDNPYLKYNHADAEFQERLKEDTSFGGNLGRAVFQAKKRLLEPLGPVEEAAKTAPGKKRPVEQSPQEPDSSAGIGKSGAQPAKKRLNFGQTGDTESVPDPQPIGEPPAAPSGVGSLTMASGGGAPVADNNEGADGVGSSSGNWHCDSQWLGDRVITTSTRTWALPTYNNHLYKQISNSTSGGSSNDNAYFGYSTPWGYFDFNRFHCHFSPRDWRRLINNNWGFRPKRLNFKLFNIQVKEVTDNNGVKTIANNLTSTVQVFTDSDYQLPYVLGSAHEGCLPPFPADVFMIPQYGYLTLNDGSQAVGRSSFYCLEYFPSQMLRTGNNFQFSYEFENVPFHSSYAHSQSLDRLMNPLIDQYLYYLSKTINGSGQNQQTLKFSVAGPSNMAVQGRNYIPGPSYRQQRVSTTVTQNNNSEFAWPGASSWALNGRNSLMNPGPAMASHKEGEDRFFPLSGSLIFGKQGTGRDNVDADKVMITNEEEIKTTNPVATESYGQVATNHQSAQAQAQTGWVQNQGILPGMVWQDRDVYLQGPIWAKIPHTDGNFHPSPLMGGFGMKHPPPQILIKNTPVPADPPTAFNKDKLNSFITQYSTGQVSVEIEWELQKENSKRWNPEIQYTSNYYKSNNVEFAVNTEGVYSEPRPIGTRYLTRNL

SEQ ID NO: 712 - protein, 736 aa, Artificial Sequence
  source: /note="Description of Artificial Sequence: Synthetic polypeptide"
MAADGYLPDWLEDNLSEGIREWWALKPGAPQPKANQQHQDNARGLVLPGYKYLGPGNGLDKGEPVNAADAAALEHDKAYDQQLKAGDNLYLKYNHADAEFQERLKEDTSFGGNLGRAVFQAKKRLLEPLGLVEEAAKTAPGKKRPVEQSPQEPDSSAGIGKSGAQPAKKRLNFGQTGDTESVPDPQPIGEPPAAPSGVGSLTMASGGGAPVADNNEGADGVGSSSGNWHCDSQWLGDRVITTSTRTWALPTYNNHLYKQISNSTSGGSSNDNAYFGYSTPWGYFDFNRFHCHFSPRDWQRLINNNWGFRPKRLNFKLFNIQVKEVTDNNGVKTIANNLTSTVQVFTDSDYQLPYVLGSAHEGCLPPFPADVFMIPQYGYLTLNDGSQAVGRSSFYCLEYFPSQMLRTGNNFQFSYEFENVPFHSSYAHSQSLDRLMNPLIDQYLHYLSKTINGSGQNQQTLKFSVAGPSNMAVQGRNYIPGPSYRQQRVSTTVTQNNNSEFAWPGASSWALNGRNSLMNPGPAMASHKEGEDRFFPLSGSLIFGKQGTGRDNVDADKVMITNEEEIKTTNPVATESYGQVATNHQSAQAQAQTGWVQNQGILPGMVWQDRDVYLQGPIWAKIPHTDGNFHPSPLMGGFGMKHPPPQILIKNTPVPADPPTAFNKDKLNSFITQYSTGQVSVEIEWELQKENSKRWNPEIQYTSNYYKSNNVEFAVNTEGVYSEPRPIGTRYLTRNL

SEQ ID NO: 713 - protein, 736 aa, Artificial Sequence
  source: /note="Description of Artificial Sequence: Synthetic polypeptide"
MAADGYLPDWLEDNLSEGIREWWALKPGAPQPKANQQHQDNARGLVLPGYKYLGPGNGLDKGEPVNAADAAALEHDKAYDQQLKAGDNPYLKYNHADAEFQERLKEDTSFGGNLGRAVFQAKKRLLEPLGLVEEAAKTAPGKKRPVEQSPQEPDSSAGIGKSGAQPAKKRLNFGQTGDTESVPDPQPIGEPPAAPSGVGSLTMASGGGAPVADNNEGADGVGSSSGNWHCDSQWLGDRVITTSTRTWALPTYNNHLYKQISNSTSGGSSNDNAYFGYSTPWGYFDFNRFHCHFSPRDWQRLINNNWGFRPKRLNFKLFNIQVKEVTDNNGVKTIANNLTSTVQVFTDSDYQLPYVLGSAHEGCLPPFPADVFMIPQYGYLTLNDGSQAVGRSSFYCLEYFPSQMLRTGNNFQFSYEFENVPFHSSYAHSQSLDRLMNPLIDQYLHYLSKTINGSGQNQQTLKFSVAGPSNMAVQGRNYIPGPSYRQQRVSTTVTQNNNSEFAWPGASSWALNGRNSLMNPGPAMASHKEGEDRFFPLSGSLIFGKQGTGRDNVDADKVMITNEEEIKTTNPVATESYGQVATNHQSAQAQAQTGWVQNQGILPGMVWQDRDVYLQGPIWAKIPHTDGNFHPSPLMGGFGMKHPPPQILIKNTPVPADPPTAFNKDKLNSFITQYSTGQVSVEIEWELQKENSKRWNPEIQYTSNYYKSNNVEFAVNTEGVYSEPRPIGTRYLTRNL

SEQ ID NO: 714 - protein, 736 aa, Artificial Sequence
  source: /note="Description of Artificial Sequence: Synthetic polypeptide"
  MOD_RES (442)..(442): Any naturally occurring amino acid
MAADGYLPDWLEDNLSEGIREWWALKPGAPQPKANQQHQDNARGLVLPGYKYLGPGNGLDKGEPVNAADAAALEHDKAYDQQLKAGDNPYLKYNHADAEFQERLKEDTSFGGNLGRAVFQAKKRLLEPLGLVEEAAKTAPGKKRPVEQSPQEPDSSAGIGKSGAQPAKKRLNFGQTGDTESVPDPQPIGEPPAAPSGVGSLTMASGGGAPVADNNEGADGVGSSSGNWHCDSQWLGDRVITTSTRTWALPTYNNHLYKQISTSTSGGSSNDNAYFGYSTPWGYFDFNRFHCHFSPRDWQRLINNNWGFRPKRLNFKLFNIQVKEVTDNNGVKTIANNLTSTVQVFTDSDYQLPYVLGSAHEGCLPPFPADVFMIPQYGYLTLNDGSQAVGRSSFYCLEYFPSQMLRTGNNFQFSYEFENVPFHSSYAHSQSLDRLMNPLIDXYLHYLSKTINGSGQNQQTLKFSVAGPSNMAVQGRNYIPGPSYRQQRVSTTVTQNNNSEFAWPGASSWALNGRNSLMNPGPAMASHKEGEDRFFPLSGSLIFGKQGTGRDNVDADKVMITNEEEIKTTNPVATESYGQVATNHQSAQAQAQTGWVQNQGILPDMVWQDRDVYLQGPIWAKIPHTDGNFHPSPLMGGFGMKHPPPQILIKNTPVPADPPTAFNKDKLNSFITQYSTGQVSVEIEWELQKENSKRWNPEIQYTSNYYKSNNVEFAVNTEGVYSEPRPIGTRYLTRNL

SEQ ID NO: 715 - protein, 736 aa, Artificial Sequence; identical to SEQ ID NO: 695
  source: /note="Description of Artificial Sequence: Synthetic polypeptide"

SEQ ID NO: 716 - protein, 736 aa, Artificial Sequence; identical to SEQ ID NO: 699
  source: /note="Description of Artificial Sequence: Synthetic polypeptide"

SEQ ID NO: 717 - protein, 736 aa, Artificial Sequence
  source: /note="Description of Artificial Sequence: Synthetic polypeptide"
MAADGYLPDWLEDNLSEGIREWWALKPGAPQPRANQQHQDNARGLVLPGYKYLGPGNGLDKGEPVNAADAAALEHDKAYDQQLKAGDNPYLKYNHADAEFQERLKEDTSFGGNLGRAVFQAKKRLLEPLGLVEEAAKTAPGKKRPVEQSPQEPDSSAGIGKSGAQPAKKRLNFGQTGDTESVPDPQPIGEPPAAPSGVGSLTMASGGGAPVADNNEGADGVGSSSGNWHCDSQWLGDRVITTSTRTWALPTYNNHLYKQISNSTSGGSSNDNAYFGYSTPWGYFDFNRFHCHFSPRDWQRLINNNWGFRPKRLNFKLFNIQVKEVTDNNGVKTIANNLTSTVQVFTDSDCQLPYVLGSAHEGCLPPFPADVFMIPQYGYLTLNDGSQAVGRSSFYCLEYFPSQMLRTGNNFQFSYEFENVPFHSSYAHSQSLDRLTNPLIDQYLYYLSKTINGSGQNQQTLKFSVAGPSNMAVQGRNYIPGPSYRQQRVSTTVTQNNNSEFAWPGASSWALNGRNSLMNPGPAMASHKEGEDRFFPLSGSLIFGKQGTGRDNVDADKVMITNEEEIKTTNPVATESHGQVATNHQSAQAQAQTGWVQNQGILPGMVWQDRDVYLQGPIWAKIPHTDGNFHPSPLMGGFGMKHPPPQILIKNTPVPADPPTAFNKDKLNSFITQYSTGQVSVEIEWELQKENSKRWNPEIQYTSNYYKSNNVEFAVNTEGVYSEPRPIGTRYLTRNL

SEQ ID NO: 718 - protein, 736 aa, Artificial Sequence
  source: /note="Description of Artificial Sequence: Synthetic polypeptide"
MAADGYLPDWLEDNLSEGIREWWALKPGAPQPKANQQHQDNARGLVLPGYKYLGPGNGLDKGEPVNAADAAALEHDKAYDQQLKAGDNPYLKYNHADAEFQERLKEDTSFGGNLGRAVFQAKKRLLEPLGLVEEAAKTAPGKKRPVEQSPQEPDSSAGIGKSGAQPAKKRLNFGQTGDTESVPDPQPIGEPPAAPSGVGSLTMASGGGAPVADNNEGADGVGSSSGNWHCDSQWLGDRVITTSTRTWALPTYNNHLYKQISNSTSGGSSNDNAYFGYSTPWGYFDFNRFHCHFSPRDWQRLINNNWGFRPKRLNFKLFNIQVKEVTDNNGVKTIANNLTSTVQVFTDSDYQLPYVLGSAHEGCLPPFPADVFMIPQYGYLTLNDGSQAVGRSSFYCLEYFPSQMLRTGNNFQFSYEFENVPFHSSYAHSQSLDRLMNPPIDQYLYYLSKTINGSGQNQQTLKFSVAGPSNMAVQGRNYIPGPSYRQQRVSTTVTQNNNSEFAWPGASSWALNGRNSLMNPGPAMASHKEGEDRFFPLSGSLIFGKQGTGRDNVDADKVMITNEEEIKTTNPVATESYGQVATNHQSAQAQAQTGWVQNQGILPGMVWQDRDVYLQGPIWAKIPHTDGNFHPSPLMGGFGMKHPPPQILIKNTPVPADPPTAFNKDKLNSFITQYSTGQVSVEIEWELQKENSKRWNPEIQYTSNYYKSNNVEFAVNTEGVYGEPRPIGTRYLTRNL

SEQ ID NO: 719 - protein, 736 aa, Artificial Sequence
  source: /note="Description of Artificial Sequence: Synthetic polypeptide"
MAADGYLPDWLEDNLSEGIREWWALKPGAPQPKANQQHQDNARGLVLPGYKYLGPGNGLDKGEPVNAADAAALEHDKAYDQQLKAGDNPYLKYNHADAEFQERLKEDTSFGGNLGRAVFQAKKRLLEPLGLVEEAAKTAPGKKRPVEQSPQEPDSSAGIGKSGAQPAKKRLNFGQTGDTESVPDPQPIGEPPAAPSGVGSLTMASGGGAPVADNNEGADGVGSSSGNWHCDSQWLGDRVITTSTRTWALPTYNNHLYKQISNSTSGGSSNDNAYFGYSTPWGYFDFNRFHCHFSPRDRQRLINNNWGFRPKRLNFKLFNIQVKEVTDNNGVKTIANNLTSTVQVFTDSDYQLPYVLGSAHEGCLPPFPADVFMIPQYGYLTLNDGSQAVGRSSFYCLEYFPSQMLRTGNNFQFSYEFENVPFHSSYAHSQSLDRLMNPLIDQYLYYLSKTINGSGQNQQTLKFSVAGPSNMAVQGRNYIPGPSYRQQRVSTTVTQNNNSEFAWPGASSWALNGRNSLMNPGPAMASHKEGEDRFFPLSGSLIFGKQGTGRDNVDADKVMITNEEEIKTTNPVATESYGQVATNHQSAQAQAQTGWVQNQGILPGMVWQDRDVYLQGPIWAKIPHTDGNFHPSPLMGGFGMKHPPPQILIKNTPVPADPPTAFNKDKLNSFITQYSTGQVSVEIEWELQKENSKRWNPEIQYTSNYYKSNNVEFAVNTEGVYSEPRPIGTRYLTRNL

SEQ ID NO: 720 - protein, 736 aa, Artificial Sequence
  source: /note="Description of Artificial Sequence: Synthetic polypeptide"
MAADGYLPDWLEDNLSEGIREWWALKPGAPQPKANQQHQDNARGLVLPGYKYLGPGNGLDKGEPVNAADAAALEHDKAYDQQLKAGDNPYLKYNHADAEFQERLKEDTSFGGNLGRAVFQAKKRLLEPLGLVEEAAKTAPGKKRPVEQSPQEPDSSAGIGKSGAQPAKKRLNFGQTGDTESVPDPQPIGEPPAAPSGVGSLTMASGGGAPVADNNEGADGVGSSSGNWHCNSQWLGDRVITTSTRTWALPTYNNHLYKQISNSTSGGSSNDNAYFGYSTPWGYFDFNRFHCHFSPRDWQRLINNNWGFRPKRLNFKLFNIQVKEVTDNNGVKTIANNLTSTVQVFTDSDYQLPYVLGSAHEGCLPPFPADVFMIPQYGYLTLNDGSQAVGRSSFYCLEYFPSQMLRTGNNFQFSYEFENVPFHSSYAHSQSLDRLMNPLIDQYLYYLSKTINGSGQNQQTLKFSVAGPGNMAVQGRNYIPGPSYRQQRVSTTVTQNNNSEFAWPGASSWALNGRNSLMNPGPAMASHKEGEDRFFPLSGSLIFGKQGTGRDNVDADKVMITNEEEIKTTNPVATESYGQVATNHQSAQAQAQTGWVQNQGILPGMVWQDRDVYLQGPIWAKIPHTDGNFHPSPLMGGFGMKHPPPQILIKNTPVPADPPTAFNKDKLNSFITQYSTGQVSVEIEWELQKENSKRWNPEIQYTSNYYKSNNVEFAVNTEGVYSEPRPIGTRYLTRNL

SEQ ID NO: 721 - protein, 736 aa, Artificial Sequence
  source: /note="Description of Artificial Sequence: Synthetic polypeptide"
MAADGYLPDWLEDNLSEGIREWWALKPGAPQPKANQQHQDNARGLVLPGYRYLGPGNGLDKGEPVNAADAAALEHDKAYDQQLKAGDNPYLKYNHADAEFQERLKEDTSFGGNLGRAVFQAKKRLLEPLGLVEEAAKTAPGKKRPVEQSPQEPDSSAGIGKSGAQPAKKRLNFGQTGDTESVPDPQPIGEPPAAPSGVGSLTMASGGGAPVADNNEGADGVGSSSGNWHCDSQWLGDRVITTSTRTWALPTYNNHLYKQISNSTSGGSSNDNAYFGYSTPWGYFDFNRFHCHFSPRDWQRLINNNWGFRPKRLNFKLFNIQVKEVTDNNGVKTVANNLTSTVQVFTDSDYQLPYVLGSAHEGCLPPFPADVFMIPQYGYLTLNDGSQAVGRSSFYCLEYFPSQMLRTGNNFQFSYEFENVPFHSSYAHSQSLDRLMNPLIDQYLYYLSKTINGSGQNQQTLKFSVAGPSNMAVQGRNYIPGPSYRQQRVSTTVTQNNNSEFAWPGASSWALNGRNSLMNPGPAMASHKEGEDRFFPLSGSLIFGKQGTGRDNVDADKVMITNEEEIKTTNPVATESYGQVATNHQSAQAQAQTGWVQNQGILPGMVWQDRDVYLQGPIWAKIPHTDGNFHPSPLMGGFGMKHPPPQILIKNTPVPADPPTAFNKDKLNSFITQYSTGQVSVEIEWELQKENSKRWNPEIQYTSNYYKSNNVEFAVNTEGVYSGPRPIGTRYLTRNL

SEQ ID NO: 722 - protein, 736 aa, Artificial Sequence; identical to SEQ ID NO: 132
  source: /note="Description of Artificial Sequence: Synthetic polypeptide"

SEQ ID NO: 723 - protein, 736 aa, Artificial Sequence
  source: /note="Description of Artificial Sequence: Synthetic polypeptide"
MAADGYLPDWLEDNLSEGIREWWALKPGAPQPKANQQRQDNARGLVLPGYKYLGPGNGLDKGEPVNAADAAALEHDKAYDQQLKAGGNPCLKYNHADAEFQERLKEDTSFGGNLGRAVFQAKKRLLEPLGLVEEAAKTAPGKKRPVEQSPQEPDSSAGIGRSGAQPAKKRLNFGQTGDTESVPDPQPIGEPPAAPSGVGSLTMASGGGAPVADNNEGADGVGSSSGNWHCDSQWLGDRVITTSTRTWALPTYNNHLYKQISNSTSGGSSNDNAYFGYSTPWGYFDFNRFHCHFSPRDWQRLINNNWGFRPKRLNFKLFNIQVKEVTDNNGVKAIANNLTSTVQVFTDSDYQLPYVLGSAHEGCLPPFPADVFMIPQYGYLTLNDGSQAVGRSSFYCLEYFPSQMLRTGNNFQFSYEFENVPFHSSYAHSQSLDRLMNPLIDQYLYYLSKTIDGSGQNQQTLKFSVAGPSNMAVQGRNYIPGPSYRQQRVSTTVTQNNNSEFAWPGASSWALNGRNSLMDPGPAMASHKEGEDRFFPLSGSLIFGKQGTGRDNVDADKVMITNEEEIKTTNPVATESYGQVATNHQSAQAQAQTGWVQNQGILPGMVWQDRDVYLQGPIWAKIPHTGGNFHPSPLMGGFGMKHPPPQILIKNTPVPADPPTAFNKDKLNSFITQYSTGQVSVEIEWELQKENSKRWNPEIQYTSNYYKSNNVEFAVNTEGVYSEPRPIGTRYLTRNL

SEQ ID NO: 724 - protein, 736 aa, Artificial Sequence
  source: /note="Description of Artificial Sequence: Synthetic polypeptide"
MAADGYLPDWLEDNLSEGIREWWALKPGAPQPKANQQHQDNARGLVLPGYKYLGPGNGLDKGEPVNAADAAALEHDKAYDQQLKAGDNPYLKYNHADAEFQERLKEDTSFGGNLGRAVFQAKKRLLEPLGLVEEAAKTAPGKKRPVEQSPQEPDSSAGIGKSGAQPAKKRLNFGQTGDTESVPDPQPIGEPPAAPSGVGSLTMASGGGAPVADNNEGADGVGSSSGNWHCDSQWLGDRVITTSTRTWALPTYNNHLYKQISNSTSGGSSNDNAYFGYSTPWGYFDFNRFHCHFSPRDWQRLINNNWGFRPKRLNFKLFNIQVKEVTDNNGVKTIANNLTSTVQVFTDSDYQLPYVLGSAHEGCLPPFPADVFMIPQYGYLTLNDGSQAVGRSSFYCLEYFPSQMLRTGNNFQFSYEFENVPFHSSYAHSQSLDRLMNPLIDQYLYYLSKTINGSGQNQQTLKFSVAGPSNMAVQGRNYIPGPSYRQQRVSTTVTQNNNSEFAWPGASSWALNGRNSLMNPGPAMASHKEGEDRFFPLSGSLIFGKQGTGRDNVDADKVMITNEEEIKTTNPVATESYGQVATNHQSAQAQAQTGWVQNQGILPGMVWQDRDVYLQGPIWAKIPHTDGNFHPSPLMGGFGMKHPPPQILIKNTPVPADPPTAFNKDKLNSFITQYSTGQVSVEIEWELQKENSKRWNPEIQYTSNYYKPNNVEFAVNTEGVYSEPRPIGTRYLTRNL

SEQ ID NO: 725 - protein, 736 aa, Artificial Sequence
  source: /note="Description of Artificial Sequence: Synthetic polypeptide"
MAADGYLPDWLEDNLSEGIREWWALKPGAPQPKANQQHQDNARGLVLPGYKYLGPGNGLDKGEPVNAADAAALEHNKAYDQQLKAGDNPYLKCNHADAEFQERLKEDTSFGGNLGRAVFQAKKRPLEPLGLVEEAAKTAPGKKRPVEQSPQEPDSSAGIGKSGAQPAKKRLNFGQTGDTESVPDPQPIGEPPAAPSGVRSLTMASGGGAPVADNNEGADGVGSSSGNWHCDSQWLGDRVITTSTRTWALPTYNNHLYKQISNSTSGGSSNDNAYLGYSTPWGYFDFNRFHCHFSPRDWQRLINNNWGFRPKRLNFKLFNIQVKEVTDNNGVKTIANNLTSTVQVFTDSDYQLPYVLGSAHEGCLPPFPADVFMIPQYGYLTLNDGSQAVGRSSFYCLEYFPSQMLRTGNNFQFSYEFENVPFHSSYAHSQSLDRLMNPLIDQYLYYLSKTINGSGQNQQTLKFSVAGPSNMAVQGRNYIPGPSYRQQRVSTTVTQNNNSEFAWPGASSWALNGRNSLMNPGPTMASHKEGEDRFFPLSGSLIFGKQGTGRDNVDADKVMITNEEEIKTTNPVATESYGQVATNHQSAQAQAQTGWVQNQGILPGMVWQDRDVYLQGPIWAKIPHTDGNFHPSPLMGGFGMKHPPPQILIKNTPVPADPPTAFNKDKLNSFITQYSTGQVSVEIEWELQKENSKRWNPEIQYTSNYYKSNNVEFAVNTEGVYSEPRPIGTRYLTRNL

SEQ ID NO: 726 - protein, 736 aa, Artificial Sequence
  source: /note="Description of Artificial Sequence: Synthetic polypeptide"
MAADGYLPDWLEDNLSEGIREWWALKPGAPQPKANQQHQDNARGLVLPGYKYLGPGNGLDKGEPVNAADAAALVHDKAYDQQLKAGDNPYLKCNHADAEFQERLKEDTSFGGNLGRAVFQAKKRLLEPLGLVEEAAKTAPGKKRPVEQSPQEPDSSAGIGKSGAQPAKKRLNFGQTGDTESVPDPQPIGEPPAAPSGVGSLTMASGGGAPVADNNEGADGVGSSSGNWHCDSQWLGDRVITTSTRTWALPTYNNHLYKQISNSTSGGSSNDNAYLGYSTPWGYFDFNRFHCHFSPRDWQRLINNNWGFRPKRLNFKLFNIQVKEVTDNNGVKTIANNLTSTVQVFTDSDYQLPYVLGSAHEGCLPPFPADVFTIPQYGYLTLNDGSQAVGRSSFYCLEYFPSQMLRTGNNFQFSYEFENVPFHSSYAHSQSLDRLMNPLIDQYLYYLSKTINGSGQNQQTLKFSVAGPSNMAVQGRNYIPGPSYRQQRVSTTVTQNNNSEFAWPGASSWALNGRNSLMNPGPAMASHKEGEDRFFPLSGSLIFGKQGTGRDNVDADKVMITNEEEIKTTNPVATESYGQVATNHQSAQAQAQTGWVQNQGILPGMVWQDRDVYLQGPIWAKIPHTDGNFHPSPLMGGFGMKHPPPQILIKNTPVPADPPTAFNKDKLNSFITQYSTGQVSVEIEWELQKENSKRWNPEIQYTSNYYKSNNVEFAVNTEGVYSEPRPIGPRYLTRNF

SEQ ID NO: 727 - protein, 736 aa, Artificial Sequence
  source: /note="Description of Artificial Sequence: Synthetic polypeptide"
MAADGYLPDWLEDNLSEGIREWWALKPGAPQPKANQQHQDNARGLVLPGYKYLGPGNGLDKGEPVNAADAAALEHNKAYDQQLKAGDNPYLKCNHADAEFQERLKEDTSFGGNLGRAVFQAKKRLLEPLGLVEEAAKTAPGKKRPVEQSPQEPDSSAGIGKSGAQPAKKRLNFGQTGDTESVPDPQPIGEPPAAPSGVRSLTMASGGGAPVADNNEGADGVGSSSGNWHCDSQWLGDRVITTSTRTWALPTYNNHLYKQISNSTSGGSSNDNAYLGYSTPWGYFDFNRFHCHFSPRDWQRLINNNWGFRPKRLNFKLFNIQVKEVTDNNGVKTIANNLTSTVQVFTDSDYQLPYVLGSAHEGCLPPFPADVFMIPQYGYLTLNDGSQAVGRSSFYCLEYFPSQMLRTGNNFQFSYEFENVPFHSSYAHSQSLDRLMNPLIDQYLYYLSKTINGSGQNQQTLKFSVAGPSNMAVQGRNYIPGPSYRQQRVSTTVTQNNNSEFAWPGASSWALNGRNSLMNPGPAMASHKEGEDRFFPLSGSLIFGKQGTGRDNVDADKVMITNEEEIKTTNPVATESYGQVATNHQSAQAQAQTGWVQNQGILPGMVWQDRDVYLQGPIWAKIPHTDGNFHPSPLMGGFGMKHPPPQILIKNTPVPADPPTAFNKDKLNSFITQYSTGQVSVEIEWELQKENSKRWNPEIQYTSNYYKSNNVEFAVNTEGVYSEPRPIGTRYLTRNL

SEQ ID NO: 728 - protein, 736 aa, Artificial Sequence
  source: /note="Description of Artificial Sequence: Synthetic polypeptide"
MAADGYLPDWLEDNLSEGIREWWALKPGAPQPKANQQHQDNARGLVLPGYKYLGPGNGLDKGEPVNAADAAALEHDKAYDQQLKAGDNPYLKCNHADAEFQERLKEDTSFGGNLGRAVFQAKKRLLEPLGLVEEAAKTAPGKKRPVEQSPQEPDSSAGIGKSGAQPAKKRLNFGQTGDTESVPDPQPIGEPPAAPSGVGSLTMASGGGAPVADNNEGADGVGSSSGNWHCDSQWLGDRVITTSTRTWALPTYNNHLYKQISNSTSGGSSNDNAYLGYSTPWGYFDFNRFHCHFSPRDWQRLINNNWGFRPKRLNFELFNIQVKEVTDNNGVKTIANNLTSTVQVFTDSDYQLPYVLGSAHEGCLPPFPADVFMIPQYGYLTLNDGSQAVGRSSFYCLEYFPSQMLRTGNNFQSSYEFENVPFHSSYAHSQSLDRLMNPLIDQYLYYLSKTINGSGQNQQTLKFSVAGPSNMAVQGRNYIPGPSYRQQRASTTVTQNNNSEFAWPGASSWALNGRNSLMNPGPAMASHKEGEDRFFPLSGSLIFGKQGTGRDNVDADKVMITNEEEIKTTNPVATESYGQVATNHQSAQAQAQTGWVQNQGILPGMVWQDRDVYLQGPIWAKIPHTDGNFHPSPLMGGFGMKHPPPQILIKNTPVPADPPTAFNKDKLNSFITQYSTGQVSVEIEWELQKENSKRWNPEIQYTSNYYKSNNVEFAVNTEGVYSEPRPIGTRYLTRNL

SEQ ID NO: 729 - protein, 736 aa, Artificial Sequence
  source: /note="Description of Artificial Sequence: Synthetic polypeptide"
MAADGYLPDWLEDNLSEGIREWWALKPGAPQPKANQQHQDNARGLVLPGYKYLGPGNGLDKGEPVNAADAAALEHDKAYDQQLKAGDNPYLKCNHADAEFQERLKEDTSFGGNLGRAVFQAKKRLLEPLGLVEEAAKTAPGKKRPVEQSPQEPDSSAGIGKSGAQPAKKRLNFGQTGDTESVPDPQPIGEPPAAPPGVGSLTMASGGGAPVADNNEGADGVGSSSGNWHCDSQWLGDRVITTSTRTWALPTYNNHLYKQISNSTSGGSSNDNAYLGYSTPWGYFDFNRFHCHFSPRDWQRLINNNWGFRPKRLNFKLFNIQVKEVTDNNGVKTIANNLTSTVQVFTDSDYQLPYVLGSAHEGCLPPFPADVFMIPQYGYLTLNDGSQAVGRSSFYCLEYFPSQMLRTGNNFQFSYEFENVPFHSSYAHSQSLDRLMNPLIDQYLYYLSKTISGSGQNQQTLKFSVAGPSNMAVQGRNYIPGPSYRQQRVSTTVTQNNSSEFAWPGASSWALNGRNSLMNPGPAMASHKEGEDRFFPLSGSLIFGKQGTGRDNVDADKVMITNEEEIKTTNPVATESYGQVATNHQSAQAQAQTGWVQNQGILSGMVWQDRDVYLQGPIWAKIPHTDGNFHPSPLMGGFGMKHPPPQILIKNTPVPADPPTAFNKDKLNSFITQYSTGQVSVEIEWELQKENSKRWNPEIQYTSNYYKSNNVEFAVNTEGVYSEPRPIGTRYLTRNL

SEQ ID NO: 730 - protein, 736 aa, Artificial Sequence
  source: /note="Description of Artificial Sequence: Synthetic polypeptide"
MAADGYLPDWLEDNLSEGIREWWALKPGAPQPKANQQHQDNARGLVLPGYKYLGPGNGLDKGEPVNAADAAALEHDKAYDQQLKAGDNPYLKCNHADAEFQERLKEDTSFGGNLGRAVFQAKKRLLEPLGLVEEAAKTAPGKKRPVEQSPQEPDSSAGIGKSGAQPAKKRLNFGQTGDTESVPDPQPIGEPPAAPSGVGSLTMASGGGAPVADNNEGADGVGSSSGNWHCDSQWLGDRVITTSTRTWALPTYNNHLYKQISNSTSGGSSNDNAYLGYSTPWGYFDFNRFHCHFSPRDWQRLINNNWGFRPKRLNFKLFNIQVKEVTDNNGVKTIANNLTSTVQVFTDSDYQLPYVLGSAHEGCLPPFPADVFMIPQYGYLTLNDGSQAVGRSSFYCLEYFPSQMLRTGNNFQFSYEFENVPFHSSYAHSQSLDRLMNPLIDQYLYYLSKTINGSGQNQQTLKFSVAGPSNMAVQGRNYIPGPSYRQQRVSTTVTQNNNSEFAWPGASSWALNGRNSLMNPGPAMASHKEGEDRFFPLSGSLIFGKQGTGRDNVDADKVMITNEEEIKTTNPVATESYGQVATNHQSAQAQAQTGWVQNQGILPGMVWQDRDVYLQGPIWAKIPHTDGNFHPSPLMGGFGMKHPPPQILIKNTPVPADPPTAFNKDKLNSFITQYSTGQVSVEIEWELQKENSKRWNPEIQYTSNYYKSNNVEFAVNTEGVYSEPRPIGTRYLTRNL

SEQ ID NO: 731 - protein, 736 aa, Artificial Sequence; identical to SEQ ID NO: 730
  source: /note="Description of Artificial Sequence: Synthetic polypeptide"

SEQ ID NO: 732 - protein, 736 aa, Artificial Sequence
  source: /note="Description of Artificial Sequence: Synthetic polypeptide"
MAADGYLPDWLEDNLSEGIREWWALKPGAPQPKANQQHQDNARGLVLPGYKYLGPGNGLDKGEPVNAADAAALEHDKAYDQQLKAGDNPYLKCNHADAEFQERLKEDTSFGGNLGRAVFQAKKRLLEPLGLVEEAAKTAPGKKRPVEQSPQEPDSSAGIGKSGAQPAKKRLNFGQTGDTESVPDPQPIGEPPAAPSGVGSLTMASGGGAPVADNNEGADGVGSSSGNWHCDSQWLGDRVITTSTRTWALPTYNNHLYKQISNSTSGGSSNDNAYLDYSTPWGYFDFNRFHCHFSPRDWQRLINNNWGFRPKRLNFKLFNIQVKEVTDNNGVKTIANNLTSTVQVFTDSDYQLPYVLGSAHEGCLPPFPADVFMIPQYGYLTLNDGSQAVGRSSFYCLEYFPSQMLRTGNNFQFSYEFENVPFHSSYAHSQSLDRLMNPLIDQYLYYLSKTINGSGQNQQTLKFSVAGPSNMAVQGRNYIPGPSYRQQRVSTTVTQNNNSEFAWPGASSWALNGRNSLMNPGPAMASHKEGEDRFFPLSGSLIFGKQGTGRDNVDADKVMITNEEEIKTTNPVATESYGQVATNHQSAQAQAQTGWVQNQGILPGMVWQGRDVYLQGPIWAKIPHTDGNFHPSPLMGGFGMKHPPPQILIKNTPVPADPPTAFNKDKLNSFITQYSTGQVSVEIEWELQKENSKRWNPEIQYTSNYYKSNNVEFAVNTEGVYSEPRPIGTRYLTRNL

SEQ ID NO: 733 - protein, 736 aa, Artificial Sequence; identical to SEQ ID NO: 730
  source: /note="Description of Artificial Sequence: Synthetic polypeptide"

SEQ ID NO: 734 - protein, 736 aa, Artificial Sequence
  source: /note="Description of Artificial Sequence: Synthetic polypeptide"
MAADGYPPDWLEDNLSEGIREWWALKPGAPQPKANQQHQDNARGLVLPGYKYLGPGNGLDKGEPVNAADAAALEHDKAYDQQLKAGDNPHLKYNHADAEFQERLKEDTSFGGNLGRAVFQAKKRLLEPLGLVEEAAKTAPGKKRPVEQSPQEPDSSAGIGKSGAQPAKKRLNFGQTGDTESVPDPQPIGEPPAAPSGVGSLTMASGGGAPVADNNEGADGVGSSSGNWHCDSQWLGDRVITTSTRTWALPTYNNHLYKQISNSTSGGSSNDNAYFGYSTPWGYFDFNRFHCHFSPRDWQRLINNNWGFRPKRLNFKLFNIQVKEVTDNNGVKTIANNLTSTVQVFTDSDYQLPYVLGSAHEGCLPPFPADVFMIPQYGYLTLNDGSQAVGRSSFYCLEYFPSQMLRTGNNFQFSYEFENVPFHSSYAHSQSLDRLMNPLIDQYLYYLSKTINGSGQNQQTLKFSVAGPSNMAVQGRNYIPGPSYRQQRVSTTVTQNNNSEFAWPGASSWALNGRNSLMNPGPAMASHKEGEDRFFPLSGSLIFGKQGTGRDNVDADKVMITNEEEIKTTNPVATESYGQVATNHQSAQAQAQTGWVQNQGILPGMVWQDRDVYLQGPIWAKIPHTDGNFHPSPLMGGFGVKHPPPQILIKNTPVPADPPTAFNKDRLNSFITQYSTGQVSVEIEWELQKENSKRWNPEIQYTSNYYKSNNVEFAVNTEGVYSEPRPIGTRYLTRNL

SEQ ID NO: 735 - protein, 736 aa, Artificial Sequence
  source: /note="Description of Artificial Sequence: Synthetic polypeptide"
MAADGYLPDWLEDNLSEGIREWWALKPGAPQPKANQQHQDNARGLVLPGYKYLGPGNGLDKGEPVNAADAAALEHDKAYDQQLKAGDNPYLKYNHADAEFQERLKEDTSFGGNLGRAVFQAKKRLLEPLGLVEEAAKTAPGKKRPVEQSPQEPDSSAGIGKSGAQPAKKRLNFGQTGDTESVPDPQPIGEPPAAPSGVGSLTMASGGGAPVADNNEGADGVGSSSGNWHCDSQWLGDRVITTSTRTWALPTYNNHLYKQISNSTSGGSSNDNAYFGYSTPWGYFDFNRFHCHFSPRDWQRLINNNWGFRPKRLNFKLFNIQVKEVTDNNGVKTIANNLTSTVQVFTDSDYQLPYVLGSAHEGCLPPFPADVFMIPQYGYLTLNDGSQAVGRSSFYCLEYFPSQMLRTGNNFQFSYEFENVPFHSSYAHSQSLDRLMNPLIDQYLYYLSKTINGSGQNQQTLKFSVAGPSNMAVQGRNYIPGPSYRQQRVSTTVTQNNNSEFAWPGASSWALNGRNSLMNPGPAMASHKEGEDRFFPLSGSLIFGKQGTGRDNVDADKVMITNEEEIKTTNPVATESYGQVATNHQSAQAQAQTGWVQNQGILPGMVWQDRDVYLQGPIWAKIPHTDGNFHPSPLMGGFGVKHPPPQILIKNTPVPADPPTAFNKDKLNSFITQYSTGQVSVEIEWELQKENSKRWNPEIQYTSNYYKSNNVEFAVNTEGVYSEPRPIGTRYLTRNL

SEQ ID NO: 736 - protein, 736 aa, Artificial Sequence
  source: /note="Description of Artificial Sequence: Synthetic polypeptide"
MAADGYLPDWLEDNLSEGIREWWALKPGAPQPKANQQHQDNARGLVLPGYKYLGPGNGLDKGEPVNAADAAALEHDKAYDQQLKAGDNPYLKYNHADAEFQERLKEDTSFGGNLGRAVFQAKKRLLEPLGLVEEAAKTAPGKKRPVEQSPQEPDSSAGIGKSGAQPAKKRLNFGQTGDTESVPDPQPIGEPPAAPSGVGSLTMASGGGAPVADNNEGADGVGSSSGNWHCDSQWLGDRVITTSTRTWALPTYNNHLYKQISNSTSGGSSNDNAYFGYSTPWGYFDFNRFHCHFSPRDWQRLTNNNWGFRPKRLNFKLFNIQVKEVTDNNGVKTIANNLTSTVQVFTDSDYQLPYVLGSAHEGCLPPFPADVFMIPQYGYLTLNDGSQAVGRSSFYCLEYIPSQMLRTGNNFQFSYEFENVPFHSSYAHSQSLDRLMNPLIDQYLYYLSKTINGSGQNQQTLKFSVAGPSNMAVQGRNYIPGPSYRQQRVSTTVTQNNNSEFAWPGASSWALNGRNSLMNPGPAMASHKEGEDRFFPLSGSLIFGKQGTGRDNVDADKVMITNEEEIKTTNPVATESYGQVATNHQSAQAQAQTGWVQNQGILPGMVWQDRDVYLQGPIWAKIPHTDGNFHPSPLMGGFGVKHPPPQILIKNTPVPADPPTAFNKDKLNSFITQYSTGQVSVEIEWELQKENSKRWNPEIQYTSNYYKSNNVEFAVNTEGVYSEPRPIGTRYLTRNL

SEQ ID NO: 737 - protein, 736 aa, Artificial Sequence
  source: /note="Description of Artificial Sequence: Synthetic polypeptide"
MAADGYLPDWLEDNLSEGIREWWALKPGAPQPKANQQHQDNARGLVLPGYKYLGPGNGLDKGEPVNAADAAALEHDKAYDQQLKAGDNPYLKYNHADAEFQERLKEDTSFGGNLGRAVFQAKKRLLEPLGLVEEAAKTAPGKKRPVEQSPQEPDSSAGIGKSGAQPAKKRLNFGQTGDTESVPDPQPIGEPPAAPSGVGSLTMASGGGAPVADNNEGADGVGSSSGNWHCDSQWLGDRVITTSTRTWALPTYNNHLYKQISNSTSGGSSNDNAYFGYSTPWGYFDFNRFHCHFSPRDWQRLINNNWGFRPKRLNFKLFNIQVKEVTDNNGVKTIANNLTSTVQVFTDSDYQLPYVLGSAHEGCLPPFPADVFMIPQYGYLTLNDGSQAVGRSSFYCLEYFPSQMLRTGNNFQFSYEFENVPFHSSYAHSQSLDRLMNPLIDQYLYYLSKTINGSGQNQQTLKFSVAGPSNMAVQGRNYIPGPSYRQQRVSTTVTQNNNSEFAWPGASSWALNGRNSLMNPGPAMASHKEGEDRFFPLSGSLISGKQGTGRDNVDANKVMITNEEEIKTTNPVATESYGQVATNHQSAQAQAQTGWVQNQGILPGMVWQDRDVYLQGPIWAKIPHTDGNFHPSPLMGGFEMKHPPPQILIKNTPVPADPPTAFNKDKLNSFITQYSTGQVSVEIEWELQKENSKRWNPEIQYTSNYYKSNNVEFAVNTEGVYSEPRPIGTRYLTRNL

SEQ ID NO: 738 - protein, 736 aa, Artificial Sequence
  source: /note="Description of Artificial Sequence: Synthetic polypeptide"
MAADGYLPDWLEDNLSEGIREWWALKPGAPQPKANQQHQDNARGLVLPGYKYLGPGNGLDKGEPVNAADAAALEHDKAYDQQLKAGDNPYLKYNHADAEFQERLKEDTSFGGNLGRAVFQAKKRLLEPLGLVEEAAKTAPGKKRPVEQSPQEPDSSAGIGKSGAQPAKKRLNFGQTGDTESVPDPQPIGEPPAAPSGVGSLTIASGGGAPVADNNEGADGVGSSSGNWHCDSQWLGDRVITTSTRTWALPTYNNHLYKRISNSTSGGSSNDNAYFGYSTPWGYFDFNRFHCHFSPRDWQRLINNNWGFRPKRLNFKLFNIRVKEVTDNNGVKTITNNLTSTVQVFTDSDYQLPYVLGSAHEGCLPPFPADVFMIPQYGYLTLNDGSQAVGRSSFYCLEYFPSQMLRTGNNFQFSYEFENVPFHSSYAHSQSLDRLMNPLIDQYLYYLSKTINGSGQNQQTLKFSVAGPSNMAVQGRNYIPGPSYRQQRVSTTVTRNNNSEFAWPGASSWALNGRNSLMNPGPAMASHKEGEDRFFPLSGSLIFGKQGTGRDNVDADKVMITNEEEIKTTNPVATESYGQVATNHQSAQAQAQTGWVQNQGILPGMVWQDRDVYLQGPIWAKIPHTDGNFHPSPLMGGFGVKHPPPQILIKNTPVPADPPTAFNKDKLNSFITQYSTGQVSVEIEWELQKENSKRWNPEIQYTSNYYKSNNVEFAVNTEGVYSEPRPIGTRYLTRNL

SEQ ID NO: 739 - protein, 736 aa, Artificial Sequence
  source: /note="Description of Artificial Sequence: Synthetic polypeptide"
MAADGYLPDWLEDNLSEGIREWWALKPGAPQPKANQQHQDNARGLVLPGYKYLGPGNGLDKGEPVNAADAAALEHDKAYDQQLKAGDNPYLKYNHADAEFQERLKEDTSFGGNLGRAVFQAKKRLLEPLGLVEEAAKTAPGKKRPVEQSPQEPDSSAGIGKSGAQPAKKRLNFGQTGDTEPVPDPQPIGEPPAAPSGVGSLTMASGGGAPVADNNEGADGVGSSSGNWHCDSQWLGDRVITTSTRTWALPTYNNHLYKQISNSTSGGSSNDNAYFGYSTPWGYFDFNRFHCHFSPRDWQRLINNNWGFRPKRLNFKLFNIQVKEVTDNNGVKTIANNLTSTVQVFTDSDYQLPYVLGSAHEGCLPPFPAGVFMIPQYGYLTLNDGSQAVGRSSFYCLEYFPSQMLRTGNNFQFSYEFENVPFHSSYAHSQSLDRLMNPLIDQYLYYLSKTINGSGQNQQTLKFSVAGPSNMAVQGRNYIPGPSYRQQRVSTTATQNNNSEFAWPGASSWALNGRNSLMNPGPAMASHKEGEDRFFPLSGSLIFGKQGTGRDNVDADKVMITNEEEIKTTNPVATESYGQVATNHQSAQAQAQTGWVQNQGILPGMVWQDRDVYLQGPIWAKIPHTDGNFHPSPLMGGFGMKHPPPQILIKNTPVPADPPTAFNKDKLNSFITQYSTGQVSVEIEWELQKENSKRWNPEIQYTSNYYKSNNVEFAVNTEGVYSEPRPIGTRYLTRNL

SEQ ID NO: 740 - protein, 736 aa, Artificial Sequence
  source: /note="Description of Artificial Sequence: Synthetic polypeptide"
MAADGYLPDWLEDNLSEGIREWWALKPGAPQPKANQQHQDNARGLVLPGYKYLGPGNGLDKGEPVNAADAAALEHDKAYDQQLKAGDNPYLKYNHADAGFQERLKEDTSFGGNLGRAVFQAKKRLLEPLGLVEEAAKTAPGKKRPVEQSPQEPDSSAGIGKSGAQPAKKRLNFGQTGDTESVPVPQPIGEPPAAPSGVGSLTMASGGGAPVADNNEGADGVGSSSGNWHCDSQWLGDRVITTSTRTWALPTYNNHLYKQISNSTSGGSSNDNAYFGYSTPWGYFDFNRFHCHFSPRDWQRLINNNWGFRPKRLNFKLFNIQVKEVTDNNGVKTIANNLTSTVQVFTDSDYQLPYVLGSAHEGCLPPFPADVFMIPQYGYLTLNDGSQAVGRSSFYCLEYFPSQMLRTGNNFQFSYEFENVPFHSSYAHSQSLDRLMNPLIDQYLYYLSKTINGSGQNQQTLKFSVAGPSNMAVQGRNYIPGPSYRQQRVSTTVTQNNNSEFAWPGASSWALNGRNSLMNPGPAMASHKEGEDRFFPLSGSLIFGKQGAGRDNVDADKVMITNEEEIKTTNPVATESYGQVATNHQSAQAQAQTGWVQNQGILPGMVWQDRDVYLQGPIWAKIPHTDGNFHPSPLMGGFGMKHPPPQILIKNTPVPADPPTAFNKDKLNSFITQYSTGQVSVEIEWELQKENSKRWNPEIQYTSNYYKSNNVEFAVNTEGVYSEPRPIGTRYLTRNL

SEQ ID NO: 741 - protein, 736 aa, Artificial Sequence
  source: /note="Description of Artificial Sequence: Synthetic polypeptide"
  MOD_RES (126)..(126): Any naturally occurring amino acid
MAADGYLPDWLEDNLSEGIRERWALKPGAPQPKANQQHQDNARGLVLPGYKYLGPGNGLDKGEPVNAADAAALEHDKAYDQQLKAGDNPYLKYNHADAEFQERLKEDTSFGGNLGRAVFQAKKRLXEPLGLVEEAAKTAPGKKRPVEQSPQEPDSSAGIGKSGAQPAKKRLNFGQTGDTESVPDPQPIGEPPAAPSGVGSLTMASGGGAPVADNNEGADGVGSSSGNWHCDSQWLGDRVITTSTRTWALPTYNNHLYKQISNSTSGGSSNDNAYFGYSTPWGYFDFNRFHCHFSPRDWQRLINNNWGFRPKRLNFKLFNIQVKEVTDNNGVKTIANNLTSTVQVFTDSDYQLPYVLGSAHEGCLPPFPADVFMIPQYGYLTLNDGSQAVGRSSFYCLEYFPSQMLRTGNNFQFSYEFENVPFHSSYAHSQSPDRLMNPLIDQYLYYLSKTINGSGQNQQTLKFSVAGPSNMAVQGRNYIPGPSYRQQRVSTTVTQNNNSEFAWPGASSWALNGRNSLMNPGPAMASHKEGEDRFFPLSGSLIFGKQGTGRDNVDADKVMITNEEEIKTTNPVATESYGQVATNHQSAQAQAQTGWVQNQGILPGMVWQDRDVYLQGPIWAKIPHTDGNFHPSPLMGGFGVKHPPPQILIKNTPVPADPPTAFNKDKLNSFITQYSTGQVSVEIEWELQKENSKRWNPEIQYTSNYYKSNNVEFAVNTEGVYSEPRPIGTRYLTRNL

SEQ ID NO: 742 - protein, 736 aa, Artificial Sequence
  source: /note="Description of Artificial Sequence: Synthetic polypeptide"
MAADGYLPDWLEDNLSEGIREWWALKPGAPQPKANQQHQDNARGLVLPGYKYLGPGNGLDKGEPVNAADAAALEHDKAYDQQLKAGDNPYLKYNHADAEFQERLKEDTSFGGNLGRAVFQAKKRLLEPLGLVEEAAKTAPGKKRPVEQSPQEPDSSAGIGKSGAQPAKKRLNFGQTGDTESVPDPQPIGEPPAAPSGVGSLTMASGGGAPVADNNEGADGVGSSSGNWHCDSQWLGDRVITTSTRTWALPTYNNHLYKQISNSTSGGSSNDNAYLGYSTPWGYFDFNRFHCHFSPRDWQRLINNNWGFRPKRLNFKLFNIQVKEVTDNNGVKTIANNLTSTVQVFTDSDYQLPYVLGSAHEGCLPPFPADVFMIPQYGYLTLNDGSQAVGRSSFYCLEYFPSQMLRTGNNFQFSYEFENVPFHSSYAHSQSLDRLMNPLIDQYLYYLSKTINGSGQNQQTLKFSVAGPSNMAVQGRNYIPGPSYRQQRVSTTVTQNNNSEFAWPGASSWALNGRNSLMNPGPAMASHKEGEDRFFPLSGSLIFGKQGTGRDNVDADKVMITNEEEIKTTNPVATESYGQVATNHQSAQAQAQTGWVQNQGILPGMVWQDRDVYLQGPIWAKIPHTDGNFHPSPLMGGFGMKHPPPQILIKNTPVPADPPTAFNKDKLNSFITQYSTGQVSVEIEWELQKENSKRWNPEIQYTSNYYKSNNVEFAVNTEGVYSEPRPIGTRYLTRNL

SEQ ID NO: 743 - protein, 736 aa, Artificial Sequence
  source: /note="Description of Artificial Sequence: Synthetic polypeptide"
MAADGYLPDWLEDNLSEGIREWWALKPGAPQPKANQQHQDNARGLVLPGYKYLGPGNGLDKGEPVNAADAAALEHDKAYDQQLKAGDNPYLKYNHADAEFQERLKEDTSFGGNLGRAVFQAKKRLLEPLGLVEEAAKTAPGKKRPVEQSPQEPDSSAGIGKSGAQPAKKRLNFGQTGDTESVPDPQPIGEPPAAPSGVGSLTMASGGGAPVADNNEGADGVGSSSGNWHCDSQWLGDRVITTSTRTWALPTYNNHLYKQISNSTSGGSSNDNAYFGYSTPWGYFDFNRFHCHFSPRDWQRLINNNWGFRPKRLNFKLFNIQVKEVTDNNGVKTIANNLTSTVQVFTDSDYQLPYVLGSAHEGCLPPFPADVFMIPQYGYLTLNDGSQAVGRSSFYCLEYFPSQMLRTGNNFQFSYEFENVPFHSSYAHSQSLDRLMNPLIDQYLYYLSKTINGSGQNQQTLKFSVAGPSNMAVQGRNYIPGPSYRQQRVSTTVTQNNNSEFAWPGASSWALNGRNSLMNPGPAMASHKEGEDRFFPLSGSLIFGKQGTGRDNVDADKVMITNEEEIKTTNPVATESYGQVATNHQSAQAQAQTGWVQNQGILPGMVWQDRDVYLQGPIWAKIPHTDGNFHPSPLMGGFGMKHPPPQILIKNTPVPADPPTAFNKDKLDSFITQYSTGQVSVEIEWELQKENSKRWNPVIQYTSNYYKSNNVEFAVNTEGVYSEPRPIGTRYLTRNL

SEQ ID NO: 744 - protein, 736 aa, Artificial Sequence
  source: /note="Description of Artificial Sequence: Synthetic polypeptide"
MAADGYLPDWLEDNLSEGIREWWDLKPGAPKPKANQQKQDDGRGLVLPGYKYLGPFNGLDKGEPVNAADAAALEHDKAYDQQLKAGDNPYLRYNHADAEFQERLQEDTSFGGNLGRAVFQAKKRVLEPLGLVEEGAKTAPGKKRPVEQSPQEPDSSSGIGKTGQQPAKKRLNFGQTGDSESVPDPQPLGEPPATPAAVGPTTMASGGGAPMADNNEGVDGVGNASGNWHCDSTWLGDRVITTSTRTWALPTYNNHLYKQISSASTGASNDNHYFGYSTPWGYFDFNRFHCHFSPRDWQRLINNNWGFRPKRLNFKLFNIQVKEVTTNDGVTTIANNLTSTVQVFSDSEYQLPYVLGSAHQGCLPPFPADVFMIPQYGYLTLNNGSQAVGRSSFYCLEYFPSQMLRTGNNFTFSYTFEEVPFHSSYAHSQSLDRLMNPLIDQYLYYLNRTQNQSGSAQNKDLLFSRGSPAGMSVQPKNWLPGPCYRQQRVSKTKTDNNNSNFTWTGASKYNLNGRESIINPGTAMASHKDDEDKFFPMSGVMIFGKESAGASNTALDNVMITDEEEIKATNPVATERFGTVAVNFQSSSTDPATGDVHAMGALPGMVWQDRDVYLQGPIWAKIPHTDGHFHPSPLMGGFGLKNPPPQILIKNTPVPANPPAEFSATKLASFITQYSTGQVSVEIEWELQKENSKRWNPEVQYTSNYAKSANVDFTVDNNGLYTEPRPIGTRYLTRPL

SEQ ID NO: 745 - protein, 736 aa, Artificial Sequence
  source: /note="Description of Artificial Sequence: Synthetic polypeptide"
MAADGYLPDWLEDNLSEGIREWWDLKPGAPKPKANQQKQDDGRGLVLPGYKYLGPFNGLDKGEPVNAADAAALEHDKAYDQQLKAGDNPYLRYNHADAEFQERLQEDTSFGGNLGRAVFQAKKRVLEPLGLVEEGAKTAPGKRRPVEQSPQEPDSSSGIGKTGQQPAKKRLNFGQTGDSESVPDPQPLGEPPATPAAVGPTTMASGGGAPMADNNEGADGVGNASGNWHCDSTWLGDRVITTSTRTWALPTYNNHLYKQISSASTGASNDNHYFGYSTPWGYFDFNRFHCHFSPRDWQRLINNNWGFRPKRLNFKLFNIQVKEVTTNDGVTTIANNLTSTVQVFSDSEYQLPYVLGSAHQGCLPPFPADVFMIPQYGYLTLNNGSQAVGRSSFYCLEYFPSQMLRTGNNFTFSYTFEEVPFHSSYAHSQSLDRLMNPLIDQYLYYLNRTQNQSGSAQNKDLLFSRGSPAGMSVQPKNWLPGPCYRQQRVSKTKTDNNNSNFTWTGASKYNLNGRESIINPGTAMASHKDDEDKFFPMSGVMIFGKESAGASNTALDNVMITDEEEIKATNPVATERFGTVAVNFQSSSTDPATGDVHAMGALPGMVWQDRDVYLQGPIWAKIPHTDGHFHPSPLMGGFGLKNPPPQILIKNTPVPANPPAEFSATKFASFITQYSTGQVSVEIEWELQKENSKRWNPEVQYTSNYAKSANVDFTVDNNGLYTEPRPIGTRYLTRPL

SEQ ID NO: 746 - protein, 736 aa, Artificial Sequence
  source: /note="Description of Artificial Sequence: Synthetic polypeptide"
MAADGYLPDWLEDNLSEGIREWWDLKPGAPKPKANQQKQDDGRGLVLPGYKYLGPFNGLDKGEPVNAADAAALEHDKAYDQQLKAGDNPYPRYNHADAEFQERLQEDTSFGGNLGRAVFQAKKRVLEPLGLVGEGAKTAPGKKRPVEQSPQEPDSSSGIGKTGQQPAKKRLNFGQTGDSESVPDPQPLGEPPATPAAVGPTTMASGGGAPMADNNEGADGVGNASGNWHCDSTWLGDRVITTSTRTWALPTYNNHLYKQISSASTGASNDNHYFGYSTPWGYFDFNRFHCHFSPRDWQRLINNNWGFRPKRLNFKLFNIQVKEVTTNDGVTTIANNLTSTVQVFSDSEYQLPYVLGSAHQGCLPPFPADVFMIPQYGYLTLNNGSQAVGRSSFYCLEYFPSQMLRTGNNFTFSYTFEEVPFHSSYAHSQSLDRLMNPPIDQYLYYLNRTQNQSGSAQNKDLLFSRGSPAGMSVQPKNWLPGPCYRQQRVSKTKTDNNNSNFTWTGASKYNLNGRESIINPGTAMASHKDDEDKFFPMSGVMIFGKESAGASNTALDNVMITDEEEIKATNPVATERFGTVAVNFQSSSTDPATGDVHAMGALPGMVWQDRDVYLQGPIWAKIPHTDGHFHPSPLMGGFGLKNPPPQILIKNTPVPANPPAEFSATKFASFITQYSTGQVSVEIEWELQKENSKRWNPEVQYTSNYAKSANVDFTVDNNGLYTEPRPIGTRYLTRPL

SEQ ID NO: 747 - protein, 736 aa, Artificial Sequence
  source: /note="Description of Artificial Sequence: Synthetic polypeptide"
MAADGYLPDWLEDNLSEGIREWWDLKPGAPKPKANQQKQDDGRGLVLPGYKYLGPFNGLDKGEPVNAADAAALEHDKAYDQQLKAGDNPYLRYNHADAEFQERLQEDTSFGGNLGRAVFQAKKRVLEPLGLVEEGAKTAPGKKRPVEQSPQEPDSSSGIGKTGQQPAKKRLNFGQTGDSESVPDPRPLGEPPATPAAVGPTTMASGGGAPMADNNEGADGVGNASGNWHCDSTWLGDRVITTSTRTWALPTYNNHLYKQISSASTGASNDNHYFGYSTPWGYFDFNRFHCHFSPRDWQRLINNNWGFRPKRLNFKLFNIQVKEVTTNDGVTTIANNLTSTVQVFSDSEYQLPYVLGSAHQGCLPPFPADVFMIPQYGYLTLNNGSQAVGRSSFYCLEYFPSQMLRTGNNFTFSYTFEEVPFHSSYAHSQSLDRLMNPLIDQYLYYLNRTQNQSGSAQNKDLLFSRGPPAGMSVQPKNWLPGPCYRQQRVSKTKTDNNNSNFTWTGASKYNLNGRESIINPGTAMASHKDDEDKFFPMSGVMIFGKESAGASNTALDNVMITDEEEIKATNPVATERFGTVAVNFQSSSTDPATGDVHAMGALPGMVWQDRDVYLQGPIWAKIPHTDGHFHPSPLMGGFGLKNPPPQILIKNTPVPANPPAEFSATKFASFITQYSTGQVSVEIEWELQKENSKRWNPEVQYTSNYAKSANVDFTVDNNGLYTEPRPIGTRYLTRPL

SEQ ID NO: 748 - protein, 736 aa, Artificial Sequence
  source: /note="Description of Artificial Sequence: Synthetic polypeptide"
MAADGYLPDWLEDNLSEGIREWWDLKPGAPKPKANQQKQDDGRGLVLPGYKYLGPFNGLDKGEPVNAADAAALEHDKAYDQQLKAGDNPYLRYNHADAEFQERLQEDTSFGGNLGRAVFQAKKRVLEPLGLVEEGAKTAPGKKRPVEQSPQEPDSSSGIGKTGQQPAKKRLNFGQTGGSESVPDPQPLGEPPATPAAVGPTTMASGGGAPMADNNEGADGVGNASGNWHCDSTWLGDRVITTSTRTWALPTYNNHLYKQISSASTGASNDNHYFGYSTPWGYFDFNRFHCHFSPRDWQRLINNNWGFRPKRLNFKLFNIQVKEVTTNDGVTTIANNLTSTVQVFSDSEYQLPYVLGSAHQGCLPPFPADVFMIPQYGYLTLNNGSQAVGRSSFYCLEYFPSQMLRTGNNFTFSYTFEEVPFHSSYAHSQSLDRLMNPPIDQYLYYLNRTQNQSGSAQNKDLLFSRGSPAGMSVQPKNWLPGPCYRQQRVSKTKTDNNNSNFTWTGASKYNLNGRESIINPGTAMASHKDDEDKFFPMSGVMIFGKESAGASNTALDNVMITDEEEIKATNPVATERFGTVAVNFQSSSTDPATGDVHAMGALPGMVWQDRDVYLQGPIWAKIPHTDGHFHPSPLMGGFGLKNPPPQILIKNTPVPANPPAEFSATKFASFITQYSTGQVSVEIEWELQKENSKRWNPEVQYTSNYAKSANVDFTVDNNGLYTEPRPIGTRYLTRPL

SEQ ID NO: 749 - protein, 736 aa, Artificial Sequence
  source: /note="Description of Artificial Sequence: Synthetic polypeptide"
MAADGYLPDWLEDNLSEGIREWWDLKPGAPKPKANQQKQDDGRGLVLPGYKYLGPFNGLDKGEPVNAADAAALEHDKAYDQQLKAGDNPYLRYNHADAEFQERLQEDTSFGGNLGRAVFQAKKRVLEPLGLVEEGAKTAPGKKRPVEQSPQEPDSSSGIGKTGQQPAKKRLNFGQTGDSESVPDPQPLGEPPATPAAVGPTTMASGGGAPMADNNEGADGVGNASGNWHCDSTWLGDRVITTSTRTWALPTYNNHLYKQISSASTGASNDNHYFGYSTPWGYFDFNRFHCHFSPRDWQRLINNNWGFRPKRLNFKLFNIQVKEVTTNDGVTTIANNLTSTVQVFSDSEYQLPYVLGSAHQGCLPPFPADVFMIPQYGYLTLNNGSQAVGRSSFYCLEYFPSQMLRTGNNFTFSYTFEEVPFHSSYAHSQSLDRLMNPLIDQYLYYLNRTQNQSGSAQNKDLLFSRGSPAGMSVQPKNWLPGPCYRQQRVSKTKTDNNNSNFTWTGASKYNLNGRESIINPGTAVASHKDDEDKFFPMSGVMIFGKESAGASNTALDNVMITDEEEIKATNPVATERFGTVAVNFQSSSTDPATGDVHAMGALPGMVWQDRDVYLQGPIWAKIPHTDGHFHPSPLMGGFGLKNPPPQILIKNTPVPANPPAEFSATKFASFITQYSTGQVSVEIEWELQKENSKRWNPEVQYTSNYAKSANVDFTVDNNGLYTEPRPIGTRYLTRPL

SEQ ID NO: 750 - protein, 736 aa, Artificial Sequence
  source: /note="Description of Artificial Sequence: Synthetic polypeptide"
MAADGYLPDWLEDNLSEGIREWWDLKPGAPKPKANQQKQDDGRGLVLPGYKYLGPFNGLDKGEPVNAADAAALEHDKAYDQQLKAGDNPYLRYNHADAEFQERLQEDTSFGGNLGRAVFQAKKRVLEPLGLVEEGAKTAPGKKRPVEQSPQEPDSSSGIGKTGQQPAKKRLNFGQTGDSESVPDPQPLGEPPATPAAVGPTTMASGGGAPMADNNEGADGVGNASGNWHCDSTWLGDRVITTSTRTWALPTYNNHLYKQISSASTGASNDNHYFGYSTPWGYFDFNRFHCHFSPRDWQQLINNNWGFRPKRLNFKLFNIQVKEVTTNDGVTTIANNLTSTVQVFSDSEYQLPYVLGSAHQGCLPPFPADVFMIPQYGYLTLNNGSQAVGRSSFYCLEYFPSQMLRTGNNFTFSYTFEEVPFHSSYAHSQSLDRLMNPLIDQYLYYLNRTQNQSGSAQNKDLLFSRGSPAGMSVQPKNWLPGPCYRQQRVSKTKTDNNNSNFTWTGASKYNLNGRESIINPGTAMASHKDDEDKFFPMSGVMIFGKESAGASNTALDNVMITDEEEIKATNPVATERFGTVAVNFQSTSTDPATGDVHAMGALPGMVWQDRDVYLQGPIWAKIPHTDGHFHPSPLMGGFGLKNPPPQILIKNTPVPANPPAEFSATKFASFITQYSTGQVSVEIEWELQKENSKRWNPEVQYTSNYAKSADVDFTVDNNGLYTEPRPIGTRYLTRPL

SEQ ID NO: 751 - protein, 736 aa, Artificial Sequence
  source: /note="Description of Artificial Sequence: Synthetic polypeptide"
MAADGYLPDWLEDNLSEGIREWWDLKPGAPKPKANQQKQDDGRGLVLPGYKYLGPFNGLDKGEPVNAADAAALEHDKAYDQQLKAGDNPYLRYNHADAEFQERLQEDTSFGGNLGRAVFQAKKRVLEPLGLVEEGAKTAPGKKRPVEQSPQEPDSSSGIGKTGQQPAKKRLNFGQTGDSESVPDPQPLGEPPATPAAVGPTTMASGGGAPMADNNEGADGVGNASGNWHCDSTWLGDRVITTSTRTWALPTYNNHLYKQISSASTGASNDNHYFGYSTPWGYFDFNRFHCHFSPRDWQRLINNNWGFRPKRLNFKLFNIQVKEVTTNDGVTTIANNLTSTVQVFSDSEYQPPYVLGSAHQGCLPPFPADVFMIPQYGHLTLNNGSQAVGRSSFYCLEYFPSQMLRTGNNFTFSYTFEEVPFHSSYAHSQSLDRLTNPLIDQYLYYLNRTQNQSGSAQNKDLLFSRGSPAGMSVQPKNWLPGPCYRQQRVSKTKTDNNNSNFTWTGASKYNLNGRESIINPGTAMASHKDDEDKFFPMSGVMIFGKESAGASNTALDNVMITDEEEIKATNPVATERFGTVAVNFQSSSTDPATGDVHAMGALPGMVWQDRDVYLQGPIWAKIPHTDGHFHPSPLMGGFGLKNPPPQILIKNTPVPANPPAEFSATKFASFITQYSTGQVSVEIEWELQKENSKRWNPEVQYTSNYAKSANVDFTVDNNGLYTEPRPIGTRYLTRPL

SEQ ID NO: 752 - protein, 736 aa, Artificial Sequence
  source: /note="Description of Artificial Sequence: Synthetic polypeptide"
MAADGYLPDWLEDNLSEGIREWWDLKPGAPKPKANQQEQDDGRGLVLPGYKYLGPFNGLDKGEPVNAADAAALEHDKAYDQQLKAGDNPYLRYNHADAEFQERLQEDTSFGGNLGRAVFQAKKRVLEPLGLVEEGAKTAPGKKRPVEQSPQEPDSSSGIGKTGQQPAKKRLNFGQTGDSESVPDPQPLGEPPATPAAVGPTTMASGGGAPMADNNEGADGVGNASGNWHCDSTWLGDRVITTSTRTWALPTYNNHLYKQISSASTGASNDNHYFGYSTPWGYFDFNRFHCHFSPRDWQRLINNNWGFRPKRLNFKLFNIQVKEVTTNDGVTTIANNLTSTVQVFSDSEYQLPYVLGSAHQGCLPPFPADVFMIPQYGYLTLNNGSQAVGRSSFYCLEYFPSQMLRTGNNFTFSYTFEEVPFHSSYAHSQSLDRLMNPLIDQYLYYLNRTQNQSGSAQNKDLLFSRGSPAGMSVQPKNWLPGPCYRQQRVSKTKTDNNNSNFTWTGASKYNLNGRESIINPGTAMASHKDDEDKFFPMSGVMIFGKESAGASNTALDNVMITDEEEIKATNPVATERFGTVAVNFQSSSTDPATGDVHATGTLPGMVWQDRDVYLQGPIWAKIPHTDGHFHPSPLMGGFGLKNPPPQILIKTTPVPANPPAEFSATKFASFITQYSTGQVSVEIEWELQKENSKRWNPEVQYTSNYAKSANVDFTVDDNGLYTEPRPIGTRYLTRPL

SEQ ID NO: 753 - protein, 736 aa, Artificial Sequence
  source: /note="Description of Artificial Sequence: Synthetic polypeptide"
MAADGYLPDWLEDNLSEGIREWWDLKPGAPKPKANQQKQDDGRGLVLPGYKYLGPFNGLDKGEPVNAADAAALEHDKAYDQQLKAGDNPYLRYNHADAEFQERLQEDTSFGGNLGRAVFQAKKRVLEPLGLVEEGAKTAPGKKRPVEQSLQEPDSSSGIGKTGQQPAKKRLNFGQTGDSESVPDPQPLGEPPATPAAVGPTTMASGGGAPMADNNEGADGVGNASGNWHCDSTWLGDRVITTSTRTWALPTYNNHLYKQISSASTGASNDNHYFGYSTPWGYFDFNRFHCHFSPRDWQRLINNNWGFRPKRLNFKLFNIQVKEVTTNDGVTTIANNLTSTVQVFSDSEYQLPYVLGSAHQGCLPPFPADVFMIPQYGYLTLNNGSQAVGRSSFYCLEYFPSQMLRTGNNFTFSYTFEEVPFHSSYAHSQSLDRLMNPLIDQYLYYLNRTQNQSGSAQNKDLLFSRGSPAGMSVQPKNWLPGPCYRQQRVSKTKTDNDNSNFTWTGASKYNLNGRESIINPGTAMASHKDDEDKFFPMSGVMIFGKESAGASNTALDNVMITDEEEIKATNPVATERFGTVAVNFQSSSTDPATGDVHAMGALPGMVWQDRDVYLQGPIWAKIPHTDGHFHPSPLMGGFGLKNPPPQILIKNTPVPANPPAEFSATKFASFITQYSTGQVSVEIEWELQKENSKRWNPEVQYTSNYAKSANVDFTVDNNGLYTEPRPIGTRYLTRPL

SEQ ID NO: 754 - protein, 736 aa, Artificial Sequence
  source: /note="Description of Artificial Sequence: Synthetic polypeptide"
MAADGYLPDWLEDNLSEGIREWWDLKPGAPKPKANQQKQDDGRGLVLPGYKYLGPFNGLDKGEPVNAADAAALEHDKAYDQQLKAGDNPYLRYNHADAEFQERLQEDTSFGGNLGRAVFQAKKRVLEPLGLVEEGAKTAPGKKRPVEQSPQEPDSSSGIGKTGQQPAKKRLNFGQTGDSESVPDPQPLGEPPATPAAVGPTTMASGGGAPMADNNEGADGVGNASGNWHCDSTWLGDRVITTSTRTWALPTYNNHLYKQISSASTGASNDNHYFGYSTPWGYFDFNRFHCHFSPRDWQRLINNNWGFRPKRLNFKLFNIQVKEVTTNDGVTTIANNLTSTVQVFSDSEYQLPYVLGSAHQGCLPPFPADVFMIPQYGYLTLNNGSQAVGRSSFYCLEYFPSQMLRTGNNFTFSYTFEEAPFHSSYAHSQSLDRLMNPLIDQYLYYLNRTQNQSGSAQNKDLLFSRGSPAGMSVQPKNWLPGPCYRQQRVSKTKTDNNNSNFTWTGASKYNLNGRESIINPGTAMASHKDDEDKFFPMSGVMIFGKESAGASNTALDNVMITDEEEIKATNPVATERFGTVAVNFQSSSTDPATGDVHAMGALPGMVWQDRDVYLQGPIWAKIPHTDGHFHPSPLMGGFGLKNPPPQILIKNTPVPANPPAEFSATKFASFITQYSTGQVSVEIEWELQKENSKRWNPEVQYTSNYAKSANVDFTVDNNGLYTEPRPVGTRYLTRPL

SEQ ID NO: 755 - protein, 736 aa, Artificial Sequence
  source: /note="Description of Artificial Sequence: Synthetic polypeptide"
MAADGYLPDWLEDNLSEGIREWWDLKPGAPKPKANQQKQDDGRGLVLPGYKYLGPFNGLDKGEPVNAADAAALEHDKAYDQQLKAGDNPYLRYNHADAEFQERLQENTSFGGNLGRAVFQAKKRVLEPLGLVEEGAKTAPGKKRPVEQSPQEPDSSSGIGKTGQQPAKKRLNFGQTGDSESVPDPQPLGEPPATPAAVGPTTMASGGGAPMADNNEGADGVGNASGNWHCDSTWLGDRVITTSTRTWALPTYNNHLYKQISSASTGASNDNHYFGYSTPWGYFDFNRFHCHFPPRDWQRLINNNWGFRPKRLNFKLFNIQVKEVTSNDGVTTIANNLTSTVQVFSDSEYQLPYVLGSAHQGCLPPFPADVFMIPQYGYLTLNNGSQAVGRSSFYCLEYFPSQMLRTGNNFTFSYTFEEVPFHSSYAHSQSLDRLMNPLIDQYLYYLNRTQNQSGSAQNKDLLFSRGSPAGMSVQPKNWLPGPCYRQQRVSKTKTDNNNSNFTWTGASKYNLNGRESIINPGTAMASHKDDEDKFFPMSGVMIFGKESAGASNTALDNVMITDEEEIKATNPVATERFGTVAVNFQSSSTDPATGDVHAMGALPGMVWQDRDVYLQGPIWAKIPHTDGHFHPSPLMGGFGLKNPPPQILIKNTPVPANPPAEFSATKFASFITQYSTGQVSVEIEWELQKENSKRWNPEVQYTSNYAKSANVDFTVDNNGLYTEPRPIGTRYLTRPL

SEQ ID NO: 756 - protein, 736 aa, Artificial Sequence
  source: /note="Description of Artificial Sequence: Synthetic polypeptide"
MAADGYLPDWLEDNLSEGIREWWDLKPGAPKPKANQQKQDDGRGLVLPGYKYLGPFNGLDKGEPVNAADAAALEHDKAYDQQLKAGDNPYLRYNHADAEFQERLQEDTSFGGNLGRAVFQAKKRVLEPLGLVEEGAKTAPGKKRPVEQSPQEPDSSSGIGKTGQQPAKKRLNFGQTGDSESVPDPQPLGEPPATPAAVGPTTMASGGGAPMADNNEGADGVGNASGNWHCDSTWLGDRVITTSTRTWALPTYNNHLYKQISSASTGASNDNHYFGYSTPWGYFDFNRFHCHFSPRDWQRLINNNWGFRPKRLNFKLFNIQVKEVTTNDGVTTIANNLTSTVQVFSDSEYQLPYVLGSAHQGCLPPFPADVFMIPQYGYLTLNNGSQAVGRSSFYCLEYFPSQMLRTGNNFTFSYTFEEVPFHSSYAHSQSLDRLMNPLIDQYLYYLNRTQNQSGSAQNKDLLFSRGSPAGTSVQPKNWLPGPCYRQQRVSKTKTDNNNSNFTWTGASKYNLNGRESIINPGTAMASHKDDEDKFFPMSGVMIFGKESAGASNTALDNVMITDEEEIKATNPVATERFGTVAVNFQSSSTDPATGDVHAMGALPGMVWQDRDVYLQGPIWAKIPHTDGHFHPSPLMGGFGLKNPPPQILIKNTPVPANPPAEFSATKFASFITQYSTGQVSVEIEWELQKENSKRWNPEVQYTSNYAKSANVDFTVDNNGLYTGPRPIGTRYLTRPL

SEQ ID NO: 757 - protein, 736 aa, Artificial Sequence
  source: /note="Description of Artificial Sequence: Synthetic polypeptide"
MAADGYLPDWLEDNLSEGIREWWDLKPGAPKPKANQQKQDDGRGLVLPGYKYLGPFNGLDKGEPVNAADAAALEHDKAYDQQLKAGDNPYLRYNHADAEFQERLQEDTSFGGNLGRAVFQAKKRVLEPLGLVEEGAKTAPGKKRPVEQSPQEPDSSSGIGKTGQQPAKKRLNFGQTGDSESVPDPQPLGEPPATPAAVGPTTMASGGGAPMADNNEGADGVGNAPGNWHCDSTWLGDRVITTSTRTWALPTYNNHLYKQISSASTGASNDNHYFGYSTPWGYFDFNRFHCHFSPRDWQRLINNNWGFRPKRLNFKLFNIQVKEVTTNDGVTTIANNLTSTVQVFSDSEYQLPYVLGSAHQGCLPPFPADVFMIPQYGYLTLNNGSQAVGRSSFYCLEYFPSQMLRTGNNFTFSYTFEEVPFHSSYAHSQSLDRLMNPLIDQYLYYLNRTQNQSGSAQNKDLLFSRGSPAGMSVQPKNWLPGPCYRQQRVSKTKTDNNNSNFTWTGASKYNLNGRESIINPGTAMASHKDDEDKFFPMSGVMIFGKESAGASNTALDNVMITGEEEIKATNPVATERFGTVAVNFQSSSTDPATGDVHAMGALPGMVWQDRDVYLQGPIWAKIPHTDGHFHPSPLMGGFGLKNPPPQILIKNTPVPANPPAEFSATKFASFITQYSTGQVSVEIEWELQKENSKRWNPEVQYTSNYAKSANVDFTVDNNGLYTEPRPIGTRYLTRPL

SEQ ID NO: 758 - protein, 736 aa, Artificial Sequence
  source: /note="Description of Artificial Sequence: Synthetic polypeptide"
MAADGYLPDWLEDNLSEGIREWWDLKPGAPKPKANQQKQDDGRGLVLPGYKYLGPFNRLDKGEPVNAADAAALEHDKAYDQQLKAGDNPYLRYNHADAEFQERLQEDTSFGGNLGRAVFQAKKRVLEPLGLVEEGAKTAPGRKRPVEQSPQEPDSSSGIGKTGQQPAKKRLNFGQTGDSESVPDPQPLGEPPATPAAVGPTTMASGGGAPMADNNEGADGVGNASGNWHCDSTWLGDRVITTSTRTWALPTYNNHLYKQISSASTGASNDNHYFGYSTPWGYFDFNRFHCHFSPRDWQRLINNNWGFRPKRLNFKLFNIQVKEVTTNDGVTTIANNLTSTVQVFSDSEYQLPYVLGSAHQGCLPPFPADVFMIPQYGYLTLNNGGQAVGRSSFYCLEYFPSQMLRTGNNFTFSYTFEEVPFHSSYAHSQSLDRLMNPLIDQYLYYLNRTQNQSGSAQNKDLLFSRGSPAGMSVQPKNWLPGPCYRQQRVSKTKTDNNNSNFTWTGASKYSLNGRESIINPGTAMASHKDDEDKFFPMGGVMIFGKESAGASNTALDNAMITDEEEIKATNPVATERFGTVAVNFQSSSTDPATGDVHAMGALPGMVWQDRDVYLQGPIWAKIPHTDGHFHPSPLMGGFGLKNPPPQILIKNTPVPANPPAEFSATKFASFITQYSTGQVSVEIEWELQKENSKRWNPEVQYTSNYAKSANVDFTVDNNGLYTEPRPIGTRYLTRPL

SEQ ID NO: 759 - protein, 736 aa, Artificial Sequence
  source: /note="Description of Artificial Sequence: Synthetic polypeptide"
MAADGYLPDWLEDNLSEGIREWWDLKPGAPKPKANQQKQDDGRGLVLPGYKYLGPFNGLDKGEPVNAADAAALEHDKAYDQQLKAGDNPYLRYNHADAEFQERLQEDTSFGGNLGRAVFQAKKRVLEPLGLVEEGAKTAPGKKRPVEQSPQEPDSSSGIGKTGQQPAKKRLNFGQTGDSESVPDPQPLGEPPATPAAVGPTTMASGGGAPMADNNEGADGVGNASGNWHCDSTWLGGRVITTSTRTWALPTYNNHLYKQISSASTGASNDNHYFGYSTPWGYFDFNRFHCHFSPRDWQRLINNNWGFRPKRLNFKLFNIQVKEVTTNDGVTTIANNLTSTVQVFSDSEYQLPYVLGSAHQGCLPPFPADVFMIPQYGYLTLNNGSQAVGRSSFYCLEYFPSQMLRTGNNSTFSYTFEEVPFHSSYAHSQSLDRLMNPLIDQYLYYLNRTQNQSGSAQNKDLLFSRGSPAGMSVQPKNWLPGPCYRQQRVSKTKTDNNNSNFTWTGASKYNLNGRESIINPGTAMASHKDDEDKFFPMSGVMIFGKESAGASNTALDNVMITDEEEIKATNPVATERFGTVAVNFQSSSTDPATGDVHAMGTLPGMVWQDRDVYLQGPIWAKIPHTDGHFHPSPLMGGFGLKNPPPQILIKNTPVPANPPAEFSATKFASFITQYSTGQVSVEIEWELQKENSKRWNPEVQYTSNYAKSANVDFTVDNNGLYTEPRPIGTRYLTRPL

SEQ ID NO: 760 - protein, 736 aa, Artificial Sequence
  source: /note="Description of Artificial Sequence: Synthetic polypeptide"
MAADGYLPDWLEDNLSEGIREWWDLKPGAPKPKANQQKQDDGRGLVLPGYKYLGPFNGLDKGEPVSAADAAALEHDKAYDQQLKAGDNPYLRYNHADAEFQERLQEDTSFGGNLGRAVFQAKKRVLEPLGLVEEGAKTAPGKKRPVEQSPQEPDSSSGIGKTGQQPAKERLNFGQTGDSESVPDPQPLGEPPATPAAVGPTTMASGGGAPMADNNEGADGVGNASGNWHCDSTWLGDRVITTSTRTWALPTYNNHLYKQISSASTGASNDNHYFGYSTPWGYFDFNRFHCHFSPRDWQRLINNNWGFRPKRLNFKLFNIQVKEVTTNDGVTTIANNLTSTVQVFSDSEYQLPYVLGSAHQGCLPPFPADVFMIPQYGYLTLNNGSQAVGRSSFYCLEYFPSQMLRTGNNFTFSYTFEEVPFHSSYAHSQSLDRLMNPLIDQYLYYLNRTQNQSGSAQNKDLLFSRGSPAGMSVQPKNWLPGPCYRQQRVSKTKTDNNNSNFTWTGASKYNLNGRESIINPGTAMASHKDDEDKFFPMSGVMIFGKESAGASNTALDNVMITDEEEIKATNPVATERFGTVAVNFQSSSTDPATGDVHAMGALPGMVWQDRDVYLQGPIWAKIPHTDGHFHPSPLMGGFGLKNPPPQILIKNTPVPANPPAEFSATKFASFITQYSTGQVSVEIEWELQKENSKRWNPEVQYTSNYAKSANVDFTVDNNGLYTEPRPIGTRYLTRPL

SEQ ID NO: 761 - protein, 736 aa, Artificial Sequence
  source: /note="Description of Artificial Sequence: Synthetic polypeptide"
MAADGYLPDWLEDNLSEGIREWWDLKPGAPKPKANQQKQDDGRGLVLPGYKYLGPFNGLDKGEPVNAADAAALEHDKAYDQQLKAGDNPYLRYNHADAEFQERLQEDTSFGGNLGRAVFQAKKRVLEPLGLVEEGAKTAPGKKRPVEQSPQEPDSSSGIGKTGQQPAKKRLNFGQTGDSESVPDPQPLGEPPATPAAVGPTTMASGGGAPMADNNEGADGVGNASGNWHCDSTWLGDRVITTSTRTWALPTYNNHLYKQISSASTGASNDNHYFGYSTPWGYFDFNRFHCHFSPRDWQRLINNNWGFRPKRLNFKLFNIQVKEVTTNDGVTTIANNLTSTVQVFSDSEYQLPYVLGSAHQGCLPPFPADVFMIPQYGYLTLNNGSQAVGRSSFYCLEYFPSQMLRTGNNFTFSYTFEEVPFHSSYAHSQSLDRLMNPLIDQYLYYLNRTQNQSGSAQNKDLLFSRGSPAGMSVQPKNWLPGPCYRQQRVSKTKTDNNNSNFTWTGASKYNLNGRESIINPGTAMASHKDDEDKFFPMSGVMIFGKESAGASNTALDNVMITDEGEIKATNPVATERFGTVAVNFQSSSTDPATGDVHAMGALPGMVWQDRDVYLQGPIWAKIPHTDGHFHPSPLMGGFGLKNPPPQILIKNTPVPANPPAEFSATKFASFITQYSTGQVSVEIEWELQKENSKRWNPEVQYTSNYAKSANVDFTVDNNGLYTEPRPIGTRYLTRPL

SEQ ID NO: 762 - protein, 736 aa, Artificial Sequence
  source: /note="Description of Artificial Sequence: Synthetic polypeptide"
MAADGYLPDWLEDNLSEGIREWWDLKPGAPKPKANQQKQDDGRGLVLPGYKYLGPFNGLDKGEPVNAADAAALEHDKAYDQQLKAGDNPYLRYNHADAEFQERLQEDTSFGGNLGRAVFQAKKRVLEPFGLVEEGAKTAPGKKRPVEQSPQEPDSSSGIGKTGQQPAKKRLNFGQTGDSESVPDPQPLGEPPATPAAVGPTTMASGGGAPMADNNEGADGVGNASGNWHCDSTWLGDRVITTSTRTWALPTYNNHLYKQISSASTGASNDNHYFGYSTPWGYFDFNRFHCHFSPRDWQRLINNNWGFRPKRLNFKLFNIQVKEVTTNDGVTTIANNLTSTVQVFSDSEYQLPYVLGSAHQGCLPPFPADVFMIPQYGYLTLNNGSQAVGRSSFYCPEYFPSQMLRTGNNFTFSYTFEEVPFHSSYAHSQSLDRLMNPLIDQYLYYLNRTQNQSGSAQNKDLLFSRGSPAGMSVQPKNWLPGPCYRQQRVSKTKTDNNNSNFTWTGASKYNLNGRESIINPGTAMASHKDDKDKFFPMSGVMIFGKESAGASNTALDNVMITDEEEIKATNPVATERFGTVAVNFQSSNTDPATGDVHVMGALPGMVWQDRDVYLQGPIWAKIPHTDGHFHPSPLMGGFGLKHPPPQILIKNTPVPANPPAEFSATKFASFITQYSTGQVSVEIEWELQKENSKRWNPEVQYTSNYAKSANVDFTVDNNGLYTEPRPIGTRYLTRPL

SEQ ID NO: 763 - protein, 736 aa, Artificial Sequence
  source: /note="Description of Artificial Sequence: Synthetic polypeptide"
MAADGYLPDWLEDNLSEGIREWWDLKPGAPKPKANQQKQDDGRGLVLPGYKYLGPFNGLDKGEPVNAADAAALEHDKAYDQQLKAGDNPYLRYNHADAEFQERLQEDTSFGGNLGRAVFQAKKRVLEPFGLVEEGAKTAPGKKRPVEQSPQEPDSSSGIGKTGQQPAKKRLNFGQTGDSESVPDPQPLGEPPATPAAVGPTTMASGGGAPMADNNEGADGVGNASGNWHCDSTWLGDRVITTSTRTWALPTYNNHLYKQISSASTGASNDNHYFGYSTPWGYFDFNRFHCHFSPRDWQRLINNNWGFRPKRLNFKLFNIQVKEVTTNDGVTTIANNLTSTVQVFSDSEYQLPYVLGSAHQGCLPPFPADVFMIPQYGYLTLNNGSQAVGRSSFYCLEYFPSQMLRTGNNFTFSYTFEEVPFHSSYAHSQSLDRLMNPLIDQYLYYLNRTQNQSGSAQNKDLLFSRGSPAGMSVQPKNWLPGPCYRQQRVSKTKTDNNNSNFTWTGASKYNLNGRESIINPGTAMASHKDDKDKFFPMSGVMIFGKESAGASNTALDNVMITDEEEIKATNPVATERFGTVAVNFQSSDTDPATGDVHVMGALPGMVWQDRDVYLQGPIWAKIPHTDGHFHPSPLMGGFGLKHPPPQILIKNTPVPANPPAEFSATKFASFITQYSTGQVSVEIEWELQKENSKRWNPEVQYTSNYAKSANVDFTVDNNGLYTEPRPIGTRYLTRPL

SEQ ID NO: 764 - protein, 736 aa, Artificial Sequence
  source: /note="Description of Artificial Sequence: Synthetic polypeptide"
MAADGYLPDWLEDNLSEGIREWWDLKPGAPKPKANQQKQGDGRGLVLPGYKYLGPFNGLDKGEPVNAADAAALEHDKAYDQQLKAGDNPYLRYNHADAEFQERLQEDTSFGGNLGRAVFQAKKRVLEPFGLVEEGAKTAPGKKRPVEQSPQEPDSSSGIGKTGQQPAKKRLNFGQTGDSESVPDPQPLGEPPATPAAVGPTTMASGGGAPMADNNEGADGVGNASGNWHCDSTWLGDRVITTNTRTWALPTYNNHLYKQISSASTGASNDNHYFGYSTPWGYFDFNRFHCHFSPRDWQRLINNNWGFRPKRLNFKLFNIQVKEVTTNDGVTTIANNLTSTVQVFSDSEYQLPYVLGSAHQGCLPPFPADVFMIPQYGYLTLNNGSQAVGRSSFYCLEYFPSQMLRTGNNFTFSYTFEEVPFHSSYGHSQSLDRLMNLLIDQYLYYLNRTQNQSGSAQNKDLLFSRGSPAGMFVQPKNWLPGPCYRQQRVSKTKTDNNNSNFTWTGASKYNLNGRESIINPGTAMASHKDDEDKFFPMSGVMIFGKESAGASNTALDNVMITDEEEIKATNPVATERFGTVAVNFQSSSTDPATGDVHVMGALPGMVWQDRDVYLQGPIWAKIPHTDGHFHPSPLMGGFGLKHPPPQILIKNTPVPANPPAEFSATKFASFITQYSTGQVSVEIEWELQKENSKRWNPEVQYTSNYAKSANVDFTVDNNGLYTEPRPIGTRYLTRPL

SEQ ID NO: 765 - protein, 736 aa, Artificial Sequence
  source: /note="Description of Artificial Sequence: Synthetic polypeptide"
MAADGYLPDWLEDNLSEGIREWWDLKPGAPKPKANQQKQDDGRGLVLPGYKYLGPFNGLDKGEPVNAADAAALEHDKAYDQQLKAGDNPYLRYNHADAEFQERLQEDTSFGGNLGRAVFQAKKRVLEPFGLVEEGAKTAPGKKRPVEQSPQEPDSSSGIGKTGQQPAKKRLNFGQTGDSESVPDPQPLGEPPATPAAVGPTTMASGGGAPMADNNEGADGVGNASGNWHCDSTWLGDRVITTNTRTWALPTYNNHLYKQISSASTGASNDNHYFGYSTPWGYFDFNRFHCHFSPRDWQRLINNNWGFRPKRLNFKLFNIQVKEVTTNDGVTTIANNLTSTVQVFSDSEYQLPYVLGSAHQGCLPPFPADVFMIPQYGYLMLNNGSQAVGRSSFYCLEYFPSQMLRTGNNFTFSYTFEEVPFHSSYAHSQSLDRLMNPLIDQYLYYLNRTQNQSGSAQNKDLLFSRGSPAGMSVQPKNWLPGPCYRQQRVSKTKTDNNNSNFTWTGASKYNLNGRESIINPGTAMASHKDDEDKFFPMSGVMIFGKESAGASNTALDNVMITDEEEIKATNPAATERFGTVAVNFQSSSTDPATGDVHVMGALPGMVWQDRDVYLQGPIWAKIPHTDGHFHPSPLMGGFGLKHPPPQILIKNTPVPANPPAEFSATKFASFITQYSTGQVSVEIEWELQKENSKRWNPEVQYTSNYAKSANVDFTVDNNGLYTEPRPIGTRYLTRPL

SEQ ID NO: 766 - protein, 736 aa, Artificial Sequence
  source: /note="Description of Artificial Sequence: Synthetic polypeptide"
MAADGYLPDWLEDNLSEGIREWWDLKPGAPKPKANQQKQDDGRGLVLPGYKYLGPFNGLDKGEPVNAADAAALEHDKAYDQQLKAGDNPYLRYNHADAEFQERLQEDTSFGGNLGRAVFQAKKRVLEPFGLVEEGAKTAPGKKRPVEQSPQEPDSSSGIGKTGQQPAKKRLNFGQTGDSESVPDPQPLGEPPATPAAVGPTTMASGGGAPMADNNEGADGVGNASGNWHCDSTWLGDRVITTSTRTWALPTYNNHLYKQISSASTGASNDNHYFGYSTPWGYFDFNRFHCHFSPRDWQRLINNNWGFRPKRLNFKLFNIQVKEVTTNDGVTTIANNLTSTVQVFSDSEYQLPYVLGSAHQGCLPPFPADVFMIPQYGYLTLNNGSQAVGRSSFYCLEYFPSQMLRTGNNFTFSYTFEEVPFHSSYAHSQSLDRLMNPLIDQYLYYLNRTQNQSGSAQNKDLLFSRGSPAGMSVQPKNWLPGPCYRQQRVSKTKTDNNNSNFTWTGASKYNLNGRESIINPGTAMASHKDDEDKFFPMSGVMIFGKESAGASNTALDNVMITDEEEIKATNPVATERFGTVAVNFQSSSTDPATGDVHVMGALPGMVWQDRDVYLQGPIWAKIPHTDGHFHPSPLMGGFGLKHPPPQILIKNTPVPANPPAEFSATKFASFITQYSTGQVSVEIEWELQKENSKRWNPEVQYTSNYAKSANVDFTVDNNGLYTEPRPIGTRYLTRPL

SEQ ID NO: 767 - protein, 736 aa, Artificial Sequence
  source: /note="Description of Artificial Sequence: Synthetic polypeptide"
  MOD_RES (102)..(102): Any naturally occurring amino acid
MAADGYLPDWLEDNLSEGIREWWDLKPGAPKPKANQQKQDDGRGLVLPGYKYLGPFNGLDKGEPVNAADAAALEHDKAYDQQLKAGDNPYLRYNHADAEFQXRLQEDTSFGGNLGRAVFQAKKRVLEPFGLVEEGAKTAPGKKRPVEQSPQEPDSSSGIGKTGQQPAKKRLNFGQTGDSESVPDPQPLGEPPATPAAVGPTTMASGGGAPMADNNEGADGVGNASGNWHCDSTWLGGRVITTSTRTWALPTYNNHLYKQISSASTGASNDNHYFGHSTPWGYFDFNRFHCHFSPRDWQRLINNNWGFRPKRLNFKLFNIQVKEVTTNDGVTTIANNLTSTVQVFSDSEYQLPYVLGSAHQGCLPPSPADVFMIPQYGYLTLNNGSQAVGRSSFYCLEYFPSQMLRTGNNFTFSYTFEEVPFHSSYAHSQSLDRLMNPLIDQYLYYLNRTQNQSGSAQNKDLLFSRGSPAGMSVQPKNWLPGPCYRQQRVSKTKTDNNNSNFTWTGASKYNLNGRESIINPGTAMASHKDDKDKFFPMSGVMIFGKESAGASNTALDNVMITDEEEIKATNPVATERFGTVAVNFQSSNTDPATGDVHVMGALPGMVWQDRDVYLQGPIWAKIPHTDGHFHPSPLMGGFGLKHPPPQILIKNTPVPANPPAEFSATKFASFITQYSTGQVSVEIEWELQKENSKRWNPEVQYTSNYAKSANVDFTVDNNGLYTEPRPIGTRYLTRPL

SEQ ID NO: 768 - protein, 736 aa, Artificial Sequence
  source: /note="Description of Artificial Sequence: Synthetic polypeptide"
MAADGYFPDWLEDNLSEGIREWWDLKPGAPKPKANQQKQDDGRGLVLPGYKYLGPFNGLDKGEPVNAADAAALEHDKAYDQQLKAGDNPYLRYNHADAEFQERLQEDTSFGGNLGRAVFQAKKRVLEPFGLVEEGAKTAPGKKRPVEQSPQEPDSSSGIGRTGQQPAKKRLNFGQTGDSESVPDPQPLGEPPATPAAVGPTTMASGGGAPMADNNEGADGVGNASGNWHCDSTWLGDRVITTSTRTWALPTYNNHLYKQISSASTGASNDNHYFGYSTPWGYFDFNRFHCHFSPRDWQRLINNNWGFRPKRLNFKLFNIQVKEVTTNDGVTTIANNLTSTVQVFSDSEYQLPYVLGSAHQGCLPPFPADVFMIPQYGYLTLNNGSQAVGRSSFYCLEYFPSQMLRTGNNFTFSYTFEEVPFHSSYAHSQSLDRLMNPLIDQYLYYLNRTQNQSGSAQNKDLLFSRGSPAGMSVQPKNWLPGPCYRQQRVSKTKTDNNNSNFTWTGASKYNLNGRESIINPGTAMASHKDDEDKFFPMSGVMIFGKESAGASNTALDNVMITDEEEIKATNPVATERFGTVAVNFQSSSPDPATGDVHVMGALPGMVWQDRDVYLQGPIWAKIPHTDGHFHPSPLMGGFGLKHPPPQILIKNTPVPANPPAEFSATKFASFITQYSTGQVSVEIEWELQKENSKRWNPEVQYTSNYAKSANVDFTVDNNGLYSEPRPIGTRYLTRPL

SEQ ID NO: 769 - protein, 736 aa, Artificial Sequence
  source: /note="Description of Artificial Sequence: Synthetic polypeptide"
MAADGYLPDWLEDNLSEGIREWWDLKPGAPKPKANQQKQDDGRGLVLPGYKYLGPFNGLDKGEPVNAADAAALEHDKAYDQQLKAGDNPYLRYNHADAEFQERLQEDTSFGGNLGRAVFQAKKRVLEPFGLVEEGAKTAPGKKRPVEQSPQEPDSSSGIGKTGQQPAKKRLNFGQTGDSESVPDPQPLGEPPATPAAVGPTTMASGGGAPMADNNEGADGVGNASGNWHCDSTWLGDRVITTSTRTWALPTYNNHLYKQTSSASTGASNDNHYFGYSTPWGYFDFNRFHCHFSPRDWQRLINNNWGFRPKRLNFKLFNIQVKEVTTNDGVTTIANNLTSTVQVFSDSEYQLPYVLGSAHQGCLPPFPADVFMIPQYGYLTLNNGSQAVGRSSFYCLEYFPSQMLRTGNNFTFSYTFEEVPFHSSYAHSQSLDRLMNPLIDQYLYYLNRTQNQSGSAQNKDLLFSRGSPAGMSVQPKNWLPGPCYRQQRVSKTKTDYNNSNFTWTGASKYNLNGRESIINPGTAMASHKDDEDKFFPMSGVMIFGKESAGASNTALDNVMITDEEEIKATNPVATERFGTVAVNFQSSSTDPATGDVHVMGALPGMVWQDRDVYLQGPIWAKIPHTDGHFHPSPLMGGFGLKHPPPQILIKNTPVPANPPAEFSATKFASFITQYSTGQVSVEIEWELQKENSKRWNPEVQYTSNYAKSANVDFTVDNNGLYTEPRPIGTRYLTRPL

SEQ ID NO: 770 - protein, 736 aa, Artificial Sequence
  source: /note="Description of Artificial Sequence: Synthetic polypeptide"
MAADGYPPDWLEDNLSEGIREWWDLKPGVPKPKANQQKQDDGRGLVLPGYKYLGPFNGLDKGEPVNAADAAALEHDKAYDQQLKAGDNPYLRYNHADAEFQERLQEDTSFGGNLGRAVFQAKKRVLEPFGLVEEGAKTAPGKKRPVEQSPQEPDSSSGIGKTGQQPAKKRLNFGQTGDSESVPDPQPLGEPPATPAAVGPTTMASGGGAPMADNNEGADGVGNASGNWHCDSTWLGDRVITTSTRTWALPTYNNHLYKQISSASTGASNDNHYFGYSTPWGYFDFNRFHCHFSPRDWQRLINNNWGFRPKRLNFKLFNIQVKEVTTNDGVTTIANNLTSTVQVFSDSEYQLPYVLGSAHQGCLPPFPADVFMIPQYGYLTLNNGSQAVGRSSFYCLEYFPSQMLRTGNNFTFSYTFEEVPFHSSYAHSQSLDRLMNPLIDQYLYYLNRTQNQSGSAQNKDLLFSRGSPAGMSVQPKNWLPGPCYRQQRVSKTKTDNNNSNFTWTGASKYNLNGRESIINPGTAMASHKDDEDKFFPMSGVMIFGKESAGASNTALDNVMITDEEEIKATNPVATERFGTVAVNFQSSSTDPATGDVHVMGALPGMVWQDRDVYLQGPIWAKIPHTDGHFHPSPLMGGFGLKHPPPQILIKNTPVPANPPAEFSATKFASFITQYSTGQVSVEIEWELQKENSKRWNPEVQYTSNYAKSANVDFTVDNNGLYTEPRPIGTRYLTRPL

SEQ ID NO: 771 - protein, 732 aa, Artificial Sequence
  source: /note="Description of Artificial Sequence: Synthetic polypeptide"
MAADGYLPDWLEDNLSEGIREWWDLKPGAPKPKANQQKQDDGRGLVLPGYKYLGPFNGLDKGEPVNAADAAALEHDKAYDQQLKAGDNPYLRYNHADAEFQERLQEDTSFGGNLGRAVFQAKKRVLEPFGLVEEGAKTAPGKKRPVEQSPQEPDSSSGIGKTGQQPAKKRLNFGQTGDSESVPDPQPLGEPPATPAAVGPTTMASGGGAPMADNNEGADGVGNASGNWHCDSTWLGDRVITTSTRTWALPTYNNHLYKQISSASTGASNDNHYFGYSTPWGYFDFNRFHCHFSPRDWQRLINNNWGFRPKRLNFKLFNIQVKEVTTNDGVTTIANNLTSTVQAFSDSEYQLPYVLGSAHQGCLPPFPADVFMIPQYGYLTLNNGSQAVGRSSFYCLEYFPSQMLRTGNNFTFSYTFEEVPFHSSYAHSQSLDRLMNPLIDPYLYYLNRTQNQSGSAQNKDLLFSRGSPAGMSVQPKNWLPGPCYRQQRVSKTKTDNNNSNFTWTGASKYNLNGRESIINPGTAMASHKDDEDKFFPMSGVMIFGKESAGASNTALDNVMITDEEEIKATNPVATERFGTVAVNFQSSSTDPATGDVHVMGALPGMVWQDRDVYLQGPIWAKIPHTDGHFHPSPLMGGFGLKHPPPQILIKNTPVPANPPAEFSATKFASFITQYSTGQVSVEIEWELQKENSKRWNPEVQYTSNYAKSANVDFTVDNNGLYTEPRPIGTRYL

SEQ ID NO: 772 - protein, 736 aa, Artificial Sequence
  source: /note="Description of Artificial Sequence: Synthetic polypeptide"
MAADGYLPDWLEDNLSEGIREWWDLKPGAPKPKANQQKQDDGRGLVLPGYKYLGPFNGLDKGEPVNAADAAALEHDKAYDQQLKAGDNPYLRYNHADAEFQERLQEDTSFGGNLGRAVFQAKKRVLEPFGLVEEGAKTAPGKKRPVEQSPQEPDSSSGIGKTGQQPAKKRLNFGQTGDSESVPDPQPLGEPPATPAAVGPTTMASGGGAPMADNNEGADGVGNASGNWHCDSTWLGDRVITTSTRTWALPTYNNHLYKQISSASTGASNDNHYFGYSTPWGYFDFNRFHCHFSPRDWQRLINNNWGFRPKRLNFKLFNIQVKEVTTNDGVTTIANNLTSTVQVFSDSEYQLPYVLGSAHQGCLPPFPADVFMIPQYGYLTLNNGSQAVGRSSFYCLEYFPSQMLRTGNNFTFSYTFEEVPFHSSYAHSQSLDRLMNPLIDQYLYYLNRTQNQSGSAQNKDLLFSRGSPAGMSVQPKNWLPGPCYRQQRVSKTKTDNNNSNFTWTGASKYNLNGRESIINPGTAMASHKDDEDKFFPMSGVMIFGKESAGASNTALDNVMITDEEEIKATNPVATERFGTVAVNFQSSSTDPATGDVHVMGALPGMVWQDRDVYLQGPIWAKIPHTDGHSHPSPLMGGFGLKHPPPQILIKNTPVPANPPAEFSATKFASFITQYSTGQVSVEIEWELQKENSKRWNPEVQYTSNYAKSANVDFTVDNNGLYTEPRPIGTRYLTRPL

SEQ ID NO: 773 - protein, 736 aa, Artificial Sequence
  source: /note="Description of Artificial Sequence: Synthetic polypeptide"
MAADGYLPDWLEDNLSEGIREWWDLKPGAPKPKANQQKQDDGRGLVLPGYKYLGPFNGLDKGEPVNAADAAALEHDKAYDQQLKAGDNPYLRYNHADAEFQERLQEDTSFGGNLGRAVFQAKKRVLEPFGLVEEGAKTAPGKKRPVEQSPQEPDSSSGIGKTGQQPAKKRLNFGQTGDSESVPDPQPLGEPPATPAAVGPTTMASGGGAPMADNNEGADGVGNASGNWHCDSTWLGDRVITTSTRTWALPTYNNHLYKQISSASTGASNDNHYFGYSTPWGYFDFNRFHCHFSPRDWQRLINNNWGFRPKRLNFKLFNIQVKEVTTNDGVTTIANNLTSTVQVFSDSEYQLPYVLGSAHQGCLPPFPADVFMIPQYGYLTLNNGSQAVGRSSFYCLEYFPSQMLRTGNNFTFSYTFEEVPFHSSYAHSQSLDRLMNPLIDLYLYYLNRTQNQSGSAQNKDLLFSRGSPAGMSVQPKNWLPGPCYRQQRVSKTKTDNNNSNFTWTGASKYNLNGRESIINPGTAMASHKDDEDKFFPMSGVMIFGKESAGTSNTALDNVMITDEEEIKATNPVATERFGTVAVNFQSSSTDPATGDVHVMGALPGMVWQDRDVYLQGPIWAKIPHTDGHFHPSPLMGGFGLKHPPPQILIKNTPVPANPPAEFSATKFASFITQYSTGQVSVEIEWELQKENSKRWNPEVQYTSNYAKSANVDFTVDNNGLYTEPRPIGTRYLTRPL

SEQ ID NO: 774 - protein, 736 aa, Artificial Sequence
  source: /note="Description of Artificial Sequence: Synthetic polypeptide"
MAADGYLPDWLEDSLSEGIREWWDLKPGAPKPKANQQKQDDGRGLVLPGYKYLGPFNGLDKGEPVNAADAAALEHDKAYDQQLKAGDNPYLRYNHADAEFQERLQEDTSFGGNLGRAVFQAKKRVLEPFGLVEEGAKTAPGKKRPVEQSPQEPDSSSGIGKTGQQPAKKRLNFGQTGDSESVPDPQPLGEPPATPAAVGPTTMASGGGAPMADNNEGADGVGNASGNWHCDSTWLGDRVITTSTRTWALPTYNNHLYKQISSASTGASNDNHYFGYSTPWGYFDFNRFHCHFSPRDWQRLINNNWGFRPKRLNFKLFNIQVKEVTTNDGVTTIANNLTSTVQVFSDSEYQLPYVLGSAHQGCLPPFPADVFMIPQYGYLTPNNGSQAVGRSSFYCLEYFPSQMLRTGNNFTFSYTFEEVPFHSSYAHSQSLDRLMNPLIDQYQYYLNRTQNQSGSAQNKDLLFSRGSPAGMSVQPKNWLPGPCYRQQRVSKTKTDNNNSNFTWTGASKYNLNGRESIINPGTAMASHKDDEDKFFPMSGVMIFGKESAGASNTALDNVMITDEEEIKATNPVATERFGTVAVNFQSSSTDPATGDVHVMGALPGMVWQDRDVYLQGPIWAKIPHTDGHFHPSPLMGGFGLKHPPPQILIKNTPVPANPPAEFSATKFASFITQYSTGQVSVEIEWELQKENSKRWNPEVQYTSNYAKSANVDFTVDNNGLYTEPRPIGTRYLTRPL

SEQ ID NO: 775 - protein, 736 aa, Artificial Sequence; identical to SEQ ID NO: 766
  source: /note="Description of Artificial Sequence: Synthetic polypeptide"

SEQ ID NO: 776 - protein, 735 aa, Artificial Sequence
  source: /note="Description of Artificial Sequence: Synthetic polypeptide"
MAADGYLPDWLEDTLSEGIRQWWKLKPGPPPPKPAERHKDDSRGLVLPGYKYLGPFNGLDKGEPVNEADAAALEHDKAYDRQLDSGDNPYLKYNHADAEFQERLKEDTSFGGNLGRAVFQAKKRVLEPLGLVEEPVKTAPGKKRPVEHSPVEPDSSSGTGKAGQQPARKRLNFGQTGDADSVPDPQPLGQPPAAPSGLGTNTMATGSGAPMADNNEGADGVGNSSGNWHCDSTWMGDRVITTSTRTWALPTYNNHLYKQISSQSGASNDNHYFGYSTPWGYFDFNRFHCHFSPRDWQRLINNNWGFRPKRLNFKLFNIQVKEVTQNDGTTTIANNLTSTVQVFTDSEYQLPYVLGSAHQGCLPPFPADVFMVPQYGYLTLNNGSQAVGRSSFYCLEYFPSQMLRTGNNFTFSYTFEDVPFHSSYAHSQSLDRLMNPLIDQYLYYLSRTNTPSGTTTQSRLQFSRAGASDIRDQSRNWLPGPCYRQQRVSKTSADNNNSEYSWTGATKYHLNGRDSLVNPGPAMASHKDDEEKFFPQSGVLIFGKQGSEKTNVDIEKVMITDEEEIRTTNPVATEQYGSVSTNLQRGNRQAATADVNTQGVLPGMVWQDRDVYLQGPIWAKIPHTDGHFHPSPLMGGFGLKHPPPQILIKNTPVPANPSTTFSAAKFASFITQYSTGQVSVEIEWELQKENSKRWNPEIQYTSNYNKSVNVDFTVDTNGVYSEPRPIGTRYLTRNL

SEQ ID NO: 777 - DNA, 2211 bp, Artificial Sequence
  source: /note="Description of Artificial Sequence: Synthetic polynucleotide"
atggctgctgacggttatcttccagattggctcgaggacaacctttctgaaggcattcgtgagtggtgggctctgaaacctggagtccctcaacccaaagcgaaccaacaacaccaggacaaccgtcggggtcttgtgcttccgggttacaaatacctcggacccggtaacggactcgacaaaggagagccggtcaacgaggcggacgcggcagccctcgaacacgacaaagcttacgaccagcagctcaaggccggtgacaacccgtacctcaagtacaaccacgccgacgccgagtttcaggagcgtcttcaagaagatacgtcttttgggggcaaccttggcagagcagtcttccaggccaaaaagaggatccttgagcctcttggtctggttgaggaagcagctaaaacggctcctggaaagaagaggcctgtagatcagtctcctcaggaaccggactcatcatctggtgttggcaaatcgggcaaacagcctgccagaaaaagactaaatttcggtcagactggcgactcagagtcagtcccagaccctcaacctctcggagaaccaccagcagcccccacaagtttgggatctaatacaatggcttcaggcggtggcgcaccaatggcagacaataacgagggtgccgatggagtgggtaattcctcaggaaattggcattgcgattcccaatggctgggcgacagagtcatcaccaccagcaccagaacctgggccctgcccacttacaacaaccatctctacaagcaaatctccagccaatcaggagcttcaaacgacaaccactactttggctacagcaccccttgggggtattttgactttaacagattccactgccacttctcaccacgtgactggcagcgactcattaacaacaactggggattccggcccaagaaactcagcttcaagctcttcaacatccaagttaaagaggtcacgcagaacgatggcacgacgactattgccaataaccttaccagcacggttcaagtgtttacggactcggagtatcagctcccgtacgtgctcgggtcggcgcaccaaggctgcctcccgccgtttccagcggacgtcttcatggtccctcagtatggatacctcaccctgaacaacggaagtcaagcggtgggacgctcatccttttactgcccggagtacttcccttcgcagatgctaaggactggaaataacttccaattcagctataccttcgaggatgtaccttttcacagcagctacgctcacagccagagtttggatcgcttgatgaatcctcttattgatcagtatctgtactacctgaacagaacgcaaggaacaacctctggaacaaccaaccaatcacggctgctttttagccaggctgggcctcagtctatgtctttgcaggccagaaattggctacctgggccctgctaccggcaacagagactttcaaagactgctaacgacaacaacaacagtaactttccttggacagcggccagcaaatatcatctcaatggccgcgactcgctggtgaatccaggaccagctatggccagtcacaaggacgatgaagaaaaatttttccctatgcacggcaatctaatatttggcaaagaagggacaacggcaagtaacgcagaattagataatgtaatgattacggatgaagaagagattcgtaccaccaatcctgtggcaacagagcagtatggaactgtggcaaataacttgcagagctcaaatacagctcccacgactagaactgtcaatgatcagggggccttacctggcatggtgtggcaagatcgtgacgtgtaccttcaaggacctatctgggcaaagattcctcacacggatggacactttcatccttctcctctgatgggaggctttggactgaaacatccgcctcctcaaatcatgatcaaaaatactccggtaccggcaaatcctccgacgactttcagcccggccaagtttgcttcatttatcactcagtactccactggacaggtcagcgtggaaattgagtgggagctacagaaagaaaacagcaaacgttggaatccagagattcagtacacttccaactacaacaagtctgttaatgtggactttactgtagacactaatggtgtttatagtgaacctcaccctattggaacccggtatctcacacgaaacttgtaa

SEQ ID NO: 778 - DNA, 2211 bp, Artificial Sequence
  source: /note="Description of Artificial Sequence: Synthetic polynucleotide"
atggctgctgatggttatcttccagattggctcgaggacaacctttctgaaggcattcgtgagtggtgggctctgaaacctggagtccctcaacccaaagcgaaccaacaacaccaggacaaccgtcggggtcttgtgcttccgggttacaaatacctcggacccggtaacggactcgacaaaggagagccggtcaacgaggcggacgcggcagccctcgaacacgacaaagcttacgaccagcagctcaaggccggtgacaacccgtacctcaagtacaaccacgccgacgccgagtttcaggagcgtcttcaagaagatacgtcttttgggggcaaccttggcagagcagtcttccaggccaaaaagaggatccttgagcctcttggtctggttgaggaagcagctaaaacggctcctggaaagaagaggcctgtagatcagtctcctcaggaaccggactcatcatctggtgttggcaaatcgggcaaacagcctgccagaaaaagactaaatttcggtcagactggcgactcagagtcagtcccagaccctcaacctctcggagaaccaccagcagcccccacaagtttgggatctaatacaatggcttcaggcggtggcgcaccaatggcagacaataacgagggtgccgatggagtgggtaattcctcaggaaattggcattgcgattcccaatggctgggcgacagagtcatcaccaccagcaccagaacctgggccctgcccacttacaacaaccatctctacaagcaaatctccagccaatcaggagcttcaaacgacaaccactactttggctacagcaccccttgggggtattttgactttaacagattccactgccacttctcaccacgtgactggcagcgactcattaacaacaactggggattccggcccaagaaactcagcttcaagctcttcaacatccaagttaaagaggtcacgcagaacgatggcacgacgactgttgccaataaccttaccagcacggttcaagtgtttacggactcggagtatcaactcccgtacgtgctcgggtcggcgcaccaaggctgtctcccgccgtttccagcggacgtcttcatggtccctcagtatggatacctcaccctgaacaacggaagtcaagcggtgggacgctcatccttttactgcctggagtacttcccttcgcagatgctaaggactggaaataacttccaattcagctataccttcgaggatgtaccttttcacagcagctacgctcacagccagagtttggatcgcttgatgaatcctcttattgatcagtatctgtactacctgaacagaacgcaaggaacaacctctggaacaaccaaccaatcacggctgctttttagccaggctgggcctcagtctatgtctttgcaggccagaaattggctacctgggccctgctaccggcaacagagactttcaaagactgctaacgacaacaacaacagtaactttccttggacagcggccagcaaatatcatctcaatggccgcgactcgctggtgaatccaggaccagctatggccagtcacaaggacgatgaagaaaaatttttccctatgcacggcaatctaatatttggcaaagaagggacaacggcaagtaacgcagaattagataatgtaatgattacggatgaagaagagattcgtaccaccaatcctgtggcaacagagcagtatggaactgtggcaaataacttgcagagctcaaatacagctcccacgactagaactgtcaatgatcagggggccttacctggcatggtgtggcaagatcgtgacgtgtaccttcaaggacctatctgggcaaagattcctcacacggatggacactttcatccttctcctctgatgggaggctttggactgaaacatccgcctcctcaaatcatgatcaaaaatactccggtaccggcaaatcctccgacgactttcagcccggccaagtttgcttcatttatcactcagtactccactggacaggtcagcgtggaaattgagtgggagctacagaaagaaaacagcaaacgttggaatccagagattcagtacacttccaactacaacaagtctgttaatgtggactttactgtagacactaatggtgtttatagtgaacctcgccctattggaacccggtatctcacacgaaacttgtaa

SEQ ID NO: 779 - DNA, 2211 bp, Artificial Sequence
  source: /note="Description of Artificial Sequence: Synthetic polynucleotide"
atggctgctgacggttatcttccagattggctcgaggacaacctttctgaaggcattcgtgagtggtgggctctgaaacctggagtccctcaacccaaagcgaaccaacaacaccaggacaaccgtcggggtcttgtgcttccgggttacaaatacctcggacccggtaacggactcgacaaaggagagccggtcaacgaggcggacgcggcagccctcgaacacgacaaagcttacgaccagcagctcaaggccggtgacaacccgtacctcaagtacaaccacgccgacgccgagtttcaggagcgtcttcaagaagatacgtcttttgggggcaaccttggcagagcagtcttccaggccaaaaagaggatccttgagcctcttggtctggttgaggaagcagctaaaacggctcctggaaagaagaggcctgtagatcagtctcctcaggaaccggactcatcatctggtgttggcaaatcgggcaaacagcctgccagaaaaagactaaatttcggtcagactggcgactcagagtcagtcccagaccctcaacctctcggagaaccaccagcagcccccacaagtttgggatctaatacaatggcttcaggcggtggcgcaccaatggcagacaataacgagggtgccgatggagtgggtaattcctcaggaaattggcattgcgattcccaatggctgggcgacagagtcatcaccaccagcaccagaacctgggccctgcccacttacaacaaccatctctacaagcaaatctccggccaatcaggagcttcaaacgacaaccactactttggctacagcaccccttgggggtattttgactttaacagattccactgccacttctcaccacgtgactggcagcgactcattaacaacaactggggattccggcccaagaaactcagcttcaagctcttcaacatccaagttaaagaggtcacgcagaacgatggcacgacgactattgccaataaccttaccagcacggttcaagtgtttacggactcggagtatcagctcccgtacgtgctcgggtcggcgcaccaaggctgtctcccgccgtttccagcggacgtcttcatggtccctcagtatggatacctcaccctgaacaacggaagtcaagcggtgggacgctcatccttttactgcctggagtacttcccttcgcagatgctaaggactggaaataacttccaattcagctataccttcgaggatgtaccttttcacagcagctacgctcacagccagagtttggatcgcttgatgaatcctcttattgatcagtatctgtactacctgaacagaacgcaaggaacaacctctggaacaaccaaccaatcacggctgctttttagccaggctgggcctcagtctatgtctttgcaggccagaaattggctacctgggccctgctaccggcaacagagactttcaaagactgctaacggcaacaacaacagtaactttccttggacagcggccagcaaatatcatctcaatggccgcgactcgctggtgaatccaggaccagctatggccagtcacaaggacgatgaagaaaaatttttccctatgcacggcaatctaatatttggcaaagaagggacaacggcaagtaacgcagaattagataatgtaatgattacggatgaagaagagattcgtaccaccaatcctgtggcaacagagcagtgtggaactgtggcaaataacttgcagagctcaaatacagctcccacgactagaactgtcaatgatcagggggccttacctggcatggtgtggcaagatcgtgacgtgtaccttcaaggacctatctgggcaaagattcctcacacggatggacactttcatccttctcctctgatgggaggctttggactgaaacatccgcctcctcaaatcatgatcaaaaatactccggtaccggcaaatcctccgacgactttcagcccggccaagtttgcttcatttatcactcagtactccactggacaggtcagcgtggaaattgagtgggagctacagaaagaaaacagcaaacgttggaatccagagattcagtacacttccaactacaacaagtctgttaatgtggactttactgtagacactaatggtgtttatagtgaacctcgccctattggaacccggtatctcacacgaaacttgtaa

SEQ ID NO: 780 - DNA, 2212 bp, Artificial Sequence
  source: /note="Description of Artificial Sequence: Synthetic polynucleotide"
  modified_base (1283)..(1283): a, c, g, or t
atggctgctgacggttatcttccagattggctcgaggacaacctttctgaaggcattcgtgagtggtgggctctgaaacctggagtccctcaacccaaagcgaaccaacaacaccaggacaaccgtcggggtcttgtgcttccgggttacaaatacctcggaccgggtaacggactcgacaaaggagagccggtcaacgaggcggacgcggcagccctcgaacacgacaaagcttacgaccagcagctcaaggccggtgacaacccgtacctcaagtacaaccacgccgacgccgagtttcaggagcgtcttcaagaagatacgtcttttgggggcaaccttggcagagcagtcttccaggccaaaaagaggatccttgagcctcttggtctggttgagggagcagctaaaacggctcctggaaagaagaggcctgtagatcagtctcctcaggaaccggactcatcatctggtgttggcaaatcgggcaaacagcctgccagaaaaagactaaatttcggtcagactggcgactcagagtcagtcccagaccctcaacctctcggagaaccaccagcagcccccacaagtttgggatctaatacaatggcttcaggcggtggcgcaccaatggcagacaataacgagggtgccgatggagtgggtaattcctcaggaaattggcattgcgattcccaatggctgggcgacagagtcatcaccaccagcaccagaacctgggccctgcccacttacaacagccatctctacaagcaaatctccagccaatcaggagcttcaaacgacaaccactactttggctacagcaccccttgggggtattttgactttaacagattccactgccacttctcaccacgtgactggcagcgactcattaacaacaactggggattccggcccaagaaactcagcttcaagctcttcaacatccaagttaaagaggtcacgcagaacgatggcacgacgactattgccaataaccttaccagcacggtccaagtgtttacggactcggagtatcagctcccgtacgtgctcgggtcggcgcaccaaggctgtctcccgccgtttccagcggacgccttcatggtccctcagtatggatacctcaccctgaacaacggaagtcaagcggtgggacgctcatccttttactgcctggagtacttcccttcgcagatgctaaggactggaaataacttccaattcagctataccttcgaggatgtaccttttcacggcagctacgctcacagccngagtttggatcgcttgatgaatcctcttattgatcagtatctgtactacctgaacagaacgcaaggaacaacctctggaacaaccaaccaatcacggctgctttttagccaggctgggcctcagtctatgtctttgcaggccagaaattggctacctgggccctgctaccggcaacagagacttttcaaagactgctaacgacaacaacaacagtaactttccttggacagcggccagcaaatatcatctcaatggccgcgactcgctggtgaatccaggaccagctatggccagtcacaaggacgatgaagaaaaatttttccctatgcacggcaatctaatatttggcaaagaagggacaacggcaagtaacgcagaattagataatgtaatgattacggatgaagaagagattcgtaccaccaatcctgtggcaacagagcagtatggaactgtggcaaataacttgcagagctcaaatacagctcccacgactagaactgtcaatgatcagggggccttacctggcatggtgtggcaagatcgtgacgtgtaccttcaaggacctatctgggcaaagattcctcacacggatggacactttcatccttctcctctgatgggaggctttggactgaaacatccgcctcctcaaatcatgatcaaaaatactccggtaccggcaaatcctccgacgactttcagcccggccaagtttgcttcatttatcactcagtactccactggacaggtcagcgtggaaattgagtgggagctacagaaagaaaacagcaaacgttggaatccagagattcagtacacttccaactacaacaagtctgttaatgtggactttactgtagacactaatggtgtttatagtgaacctcgccctattggaacccggtatctcacacgaaactcgtaa

SEQ ID NO: 781 - DNA, 2212 bp, Artificial Sequence
  source: /note="Description of Artificial Sequence: Synthetic polynucleotide"
atggctgctgacggttatcttccagattggctcgaggacaacctttctgaaggcattcgtgagtggtgggctctgaaacctggagtccctcaacccaaagcgaaccaacaacaccaggacaaccgtcggggtcttgtgcttccgggttacaaatacctcggacccggtaacggactcgacaaaggagagccggtcaacgaggcggacgcggcagccctcgaacacgacaaagcttacgaccagcagctcaaggccggtgacaacccgtacctcaagtacaaccacgccgacgccgagtttcaggagcgtcttcaagaagatacgtcttttgggggcaaccttggcagagcagtcttccaggccaaaaagaggatccttgagcctcttggtctggttgagggagcagctaaaacggctcctggaaagaagaggcctgtagatcagtctcctcaggaaccggactcatcatctggtgttggcaaatcgggcaaacagcttgccagaaaaagactaaatttcggtcagactggcgactcagagtcagtcccagaccctcaacctctcggagaaccaccagcagcccccacaagtttgggatctaatacaatggcttcaggcggtggcgcaccaatggcagacaataacgagggtgccgatggagtgggtaattcctcaggaaattggcattgcgattcccaatggctgggcgacagagtcatcaccaccagcaccagaacctgggccctgcccacttacaacagccatctctacaagcaaatctccggccaatcaggagcttcaaacgacaaccactactttggctacagcaccccctgggggtattttgactttaacagattccactgccacttctcaccacgtgactggcagcgactcattaacaacaactggggattccggcccaagaaactcagcttcaagctcttcaacatccaagttaaagaggtcacgcagaacgatggcacgacgactattgccaataaccttaccagcacggttcaagtgtttacggactcggagtatcagctcccgtacgtgctcgggtcggcgcaccaaggctgtctcccgccgtttccagcggacgtcttcatggtccctcagtatggatacctcaccctgaacaacggaagtcaagcggtgggacgctcatccttttactgcctggagtacttcccttcgcagatgctaaggactggaaataacttccaattcagctataccttcgaggatgtaccttttcacagcagctacgctcacagccagagtttggatcgcttgatgaatcctcttattgatcagtatctgtactacctgaacagaacgcaaggaacaacctctggaacaaccaaccaatcacggctgctttttagccaggctgggcctcagtctatgtctttgcaggccagaaattggctacctgggccctgctaccggcaacagagactttcaaagactgctaacgacaacaacaacagtaactttccttggacagcggccagcaaatatcatctcaatggccgcgactcgctggtgaatcccaggaccagctatggccagtcacaaggacgatgaagaaaaatttttccctatgcacggcaatctaatatttggcaaagaagggacaacggcaagtaacgcagaattagataatgtaatgattacggatgaagaagagattcgtaccaccaatcctgtggcaacagagcagtatggaactgtggcaaataacttgcagagctcaaatacagctcccacgactagaactgtcaatgatcagggggccttacctggcatggtgtggcaagatcgtgacgtgtaccttcaaggacctatctgggcaaagattcctcacacggatggacactttcatccttctcctctgatgggaggctttggactgaaacatccgcctcctcaaatcatgatcaaaaatactccggtaccggcaaatcctccgacgactttcagcccggccaagtttgcttcatttatcactcagtactccactggacaggtcagcgtggaaattgagtgggagctacagaaagaaaacagcaaacgttggaatccagagattcagtacacttccaactacaacaagtctgttaatgtggactttactgtagacactaatggtgtttatagtgaacctcgccctattggaacccggtatctcacacgaaacttgtaa

SEQ ID NO: 782 - DNA, 2212 bp, Artificial Sequence
  source: /note="Description of Artificial Sequence: Synthetic polynucleotide"
atggctgctgacggttatcttccagattggctcgaggacaacctttctgaaggcattcgtgagtggtgggctctgaaacctggagtccctcaacccaaagcgaaccaacaacaccaggacgaccgtcggggtcttgtgcttccgggttacaaatacctcggacccggtaacggactcgacaaaggagagccggtcaacgaggcggacgcggcagccctcgaacacgacaaagcttacgaccagcagctcaaggccggtgacaacccgtgcctcaagtacaaccacgccgacgccgagtttcaggagcgtcttcaagaagatacgtcttttgggggcaaccttggcagagcagtcttccaggccaaaaagaggatccttgagcctcttggtctggttgaggaagcagctaaaacggctcctggaaagaagaggcctgtagatcagtctcctcaggaaccggactcatcatctggtgttggcaaatcgggcaaacagcctgccagaaaaagactaaatttcggtcagactggcgactcagagtcagtcccagaccctcaacctctcggagaaccaccagcagcccccacaagtttgggatctaatacaatggcttcaggcggtagcgcaccaatggcagacaataacgagggtgccgatggagtgggtaattcctcaggaaattggcattgcgattcccaatggctgggcgacagagtcatcaccaccagcaccagaacctgggccctgcccacttacaacaaccatctctacaagcaaatctccagccaatcaggagcttcaaacgacaaccactactttggctacagcaccccttgggggtattttgactttaacagattccactgccacttctcaccacgtgactggcagcgactcattaacaacaactggggattccggcccaagaaactcagcttcaagctcttcaacatccaagttaaagaggtcacgcagaacgatggcacgacgactattgccaataaccttaccagcacggttcaagtgtttacggactcggagtatcagctcccgtacgtgctcgggtcggcgcaccaaggctgtctcccgccgtttccagcggacgtcttcatggtccctcagtatggatacctcaccctgaacaacggaagtcaagcggtgggacgctcatccttttactgcctggagtacttcccttcgcagatgctaaggactggaaataacttccaattcagctataccttcgaggatgtaccttttcacagcagctacgctcacagccagagtttggatcgcttgatggatcctcttattgatcagtatctgtactacctgaacagaacgcaaggaacaacctctggaacaaccaaccaatcacggctgctttttagccaggctgggcctcagtctatgtctttgcaggccagaaattggctacctgggccctgctaccggcaacagagactttcaaagactgctaacgacaacaacaacagtaactttccttggacagcggccagcaaatatcatctcaatggccgcgactcgctggtgaatccaggaccagctatggccagtcacaaaggacgatgaagaaaaatttttccctatgcacggcaatctaatatttggcaaagaagggacaacggcaagtaacgcagaattagataatgtaatgattacggatgaagaagagattcgtaccaccaatcctgtggcaacagagcagtatggaactgtggcaaataacttgcagagctcaaatacagctcccacgactagaactgtcaatgatcagggggccttacctggcatggtgtggcaagatcgtgacgtgtaccttcaaggacctatctgggcaaagattcctcacacggatggacactttcatccttctcctctgatgggaggctttggactgaaacatccgcctcctcaaatcatgatcaaaaatactccggtaccggcaaatcctccgacgactttcagcccggccaagtttgcttcatttatcactcagtactccactggacaggtcagcgtggaaattgagtgggagctacagaaagaaaacagcaaacgttggaatccagagattcagtacacttccaactacaacaagtctgttaatgtggactttactgtagacactaatggtgtttatagtgaacctcgccctattggaacccggtatctcacacgaaacctgtaa

SEQ ID NO: 783 - DNA, 2211 bp, Artificial Sequence
  source: /note="Description of Artificial Sequence: Synthetic polynucleotide"
atggctgctgacggttatcttccagattggctcgaggacaacctttctgaaggcattcgtgagtggtgggctctgaaacctggagtccctcaacccaaagcgaaccaacaacaccaggacgaccgtcggggtcttgtgcttccgggttacaaatacctcggacccggtaacggactcgacaaaggagagccggtcaacgaggcggacgcggcagccctcgaacacgacaaagcttacgaccagcagctcaaggccggtgacaacccgtacctcaagtacaaccacgccgacgccgagtttcaggagcgtcttcaagaagatacgtcttttgggggcaaccttggcagagcagtcttccaggccaaaaagaggatccttgagcctcttggtctggttgaggaagcagctaaaacggctcctggaaagaagaggcctgtagatcagtctcctcaggaaccggactcatcatctggtgttggcaaatcgggcaaacagcctgccagaaaaagactaaatttcggtcagactggcgactcagagtcagtcccagaccctcaacctctcggagaaccaccagcagcccccacaagtttgggatctaatacaatggcttcaggcggtggcgcaccaatggcagacaataacgagggtgccgatggagtgggtaattcctcaggaaattggcattgcgattcccaatggctgggcaacagagtcatcaccaccagcaccagaacctgggccctgcccacttacaacaaccatctctacaagcaaatctccagccaatcaggagcttcaaacgacaaccactactttggctacagcaccccttgggggtattttgactttaacagattccactgccacttctcaccacgtgactggcagcgactcattaacaacaactggggattccggcccaagaaactcagcttcaagctcttcaacatccaagttaaagaggtcacgcagaacgatggcacgacgactattgccaataaccttaccagcacggttcaagtgtttacggactcggagtatcagctcccgtacgtgctcgggtcggcgcaccaaggctgtctcccgccgtttccagcggacgtcttcatggtccctcagtatggatacctcaccctgaacaacggaagtcaagcggtgggacgctcatccttttactgcctggagtacttcccttcgcagatgctaaggactggaaataacttccaattcagctataccttcgaggatgtaccttttcacagcagctacgctcacagccagagtttggatcgcttgatgaatcctcttattgatcagtatctgtactacctgaacagaacgcaaggaacaacctctggaacaaccaaccaatcacggctgctttttagccaggctgggcctcagtctatgtctttgcaggccagaaattggctacctgggccctgctaccggcaacagagactttcaaagactgctaacgacaacaacaacagtaactttccttggacagcggccagcaaatatcatctcaatggccgcgactcgctggtgaatccaggaccagctatggccagtcacaaggacgatgaagaaaaatttttccctatgcacggcaatctaatatttggcaaagaagggacaacggcaagtaacgcagaattagataatgtaatgattacggatgaagaagagattcgtaccaccaatcctgtggcaacagagcagtatggaactgtggcaaataacttgcagagctcaaatacagctcccacgactagaactgtcaatgatcagggggccttacctggcatggtgtggcaagatcgtgacgtgtaccttcaaggacctatctgggcaaagattcctcacacggatggacactttcatccttctcctctgatgggaggctttggactgaaacatccgcctcctcaaatcatgatcaaaaatactccggtaccggcaaatcctccgacgactttcagcccggccaagtttgcttcatttatcactcagtactccactggacaggtcagcgtggaaattgagtgggagctacagaaagaaaacagcaaacgttggaatccagagattcagtacacttccaactacaacaagtctgttaatgtggactttactgtagacactaatggtgtttatagtgaacctcgccctattggaacccggtatctcacacgaaacttgtaa

SEQ ID NO: 784 - DNA, 2211 bp, Artificial Sequence
  source: /note="Description of Artificial Sequence: Synthetic polynucleotide"
atggctgctgacggttatcttccagattggctcgaggacaacctttctgaaggcattcgtgagtggtgggctctgaaacctggagtccctcaacccaaagcgaaccaacaacaccaggacgaccgtcggggtcttgtgcttccgggttacaaatacctcggacccggtaacggactcgacaaaggagagccggtcaacgaggcggacgcggcagccctcgaacacgacaaagcttacgaccagcagctcaaggccggtgacaacccgtacctcaagtacaaccacgccgacgccgagtttcaggagcgtcttcaagaagatacgtcttttgggggcaaccttggcagagcagtcttccaggccaaaaagaggatccttgagcctcttggtctggttgaggaagcagctaaaacggctcctggaaagaagaggcctgtagatcagtctcctcaggaaccggactcatcatctggtgttggcaaatcgggcaaacagcctgccagaaaaagactaaatttcggtcagactggcgactcagagtcagtcccagaccctcaacctctcggagaaccaccagcagcccccacaagtttgggatctaatacaatggcttcaggcggtggcgcaccaatggcggacaataacgagggtgccgatggagtgggtaattcctcaggaaattggcattgcgattcccaatggctgggcgacagagtcatcaccaccagcaccagaacctgggccctgcccacttacaacaaccatctctacaagcaaatctccagccaatcaggagcttcaaacgacaaccactactttggctacagcaccccttgggggtattttgactttaacagattccactgccacttctcaccacgtgactggcagcgactcattaacaacaactggggattccggcccaagaaactcagcttcaagctcttcaacatccaagttaaagaggtcacgcagaacgatggcacgacgactattgccaataaccttaccagcacggttcaagtgtttacggactcggagtatcagctcccgtacgtgctcgggtcggcgcaccaaggctgtctcccgccgtttccagcggacgtcttcatggtccctcagtatggatacctcaccctgaacaacggaagtcaagcggtgggacgctcatccttttactgcctggagtacttcccttcgcagatgctaaggactggaaataacttccaattcagctataccttcgaggatgtaccttttcacagcagctacgctcacagccagagtttggatcgcttgatgaatcctcttattgatcagtatctgtactacctgaacagaacgcaaggaacaacctctggaacaaccaaccaatcacggctgctttttagccaggctgggcctcagtctatgtctttgcaggccagaaattggctacctgggccctgctaccggcaacagagactttcaaagactgctaacgacaacaacaacagtaactttccttggacagcggccagcaaatatcatctcaatggccgcgactcgctggtgaatccaggaccagctatggccagtcacaaggacgatgaagaaaaatttttccctatgcacggcaatctaatatttggcaaagaagggacaacggcaagtaacgcagaattagataatgtaatgattacggatgaagaagagattcgtaccaccaatcctgtggcaacagtgcagtatggaactgtggcaaataacttgcagagctcaaatacagctcccacgactagaactgtcaatgatcagggggccttacctggcatggtgtggcaagatcgtgacgtgtaccttcaaggacctatctgggcaaagattcctcacacggatggacactttcatccttctcctctgatgggaggctttggactgaaacatccgcctcctcaaatcatgatcaaaaatactccggtaccggcaaatcctccgacgactttcagcccggccaagtttgcttcatttatcactcagtactccactggacaggtcagcgtggaaattgagtgggagctacagaaagaaaacagcaaacgttggaatccagagattcagtacacttccaactacaacaagtctgttaatgtggactttactgtagacactaatggtgtttatagtgaacctcgccctattggaacccggtatctcacacgaaacttgtaa

SEQ ID NO: 785 - DNA, 2211 bp, Artificial Sequence
  source: /note="Description of Artificial Sequence: Synthetic polynucleotide"
atggctgctgacggttatcttccagattggctcgaggacaacctttctgaaggcattcgtgagtggtgggctctgaaacctggagtccctcaacccaaagcgaaccaacaacaccaggacaaccgtcggggtcttgtgcttccgggttacaaatacctcggacccggtaacggactcgacaaaggagagccggtcaacgaggcggacgcggcagccctcgaacacgacaaagcttacgaccagcagctcaaggccggtgacaacccgtacctcaagtacaaccacgccgacgccgagtttcaggagcgtcttcaagaagatacgtcttttgggggcaaccttggcagagcagtcttccaggccaaaaaggggatccttgagcctcttggtctggttgaggaagcagctaaaacggctcctggaaagaagaggcctgtagatcagtctcctcaggaaccggactcatcatctggtgttggcaaatcgggcaaacagcctgccagaaaaagactaaatttcggtcagactggcgactcagagtcagtcccagaccctcaacctctcggagaaccaccagcagcccccacaagtttgggatctaatacaatggcttcaggcggtggcgcaccaatggcagacaataacgagggtgccgatggagtgggtaattcctcaggaaattggcattgcgattcccaatggctgggcgacagagtcatcaccaccagcaccagaacctgggccctgcccacttacaacaaccatctctacaagcaaatctccagccaatcaggagcttcaaacgacaaccactactttggctacagcaccccttgggggtattttgactttaacagattccactgccacttctcaccacgtgactggcagcgactcattaacaacaactggggattccggcccaagaaactcagcttcaagctcttcaacatccaagttaaagaggtcacgcagaacgatggcacgacgactattgccaataaccttaccagcacggttcaagtgtttacggactcggagtatcagctcccgtacgtgttcgggtcggcgcaccaaggctgtctcccgccgtttccagcggacgtcttcatggtccctcagtatggatacctcaccctgaacaacggaagtcaagcggtgggacgctcatccttttactgcctggagtacttcccttcgcagatgctaaggactggaaataacttccaattcagctataccttcgaggatgtaccttttcacagcagctacgctcacagccagagttcggatcgcttgatgaatcctcttattgatcagtatctgtactacctgaacagaacgcaaggaacaacctctggaacaaccaaccaatcacggctgctttttagccaggctgggcctcagtctatgtctttgcaggccagaaattggctacctgggccctgctaccggcaacagagactttcaaagactgctaacgacaacaacaacagtaactttccttgaacagcggccagcaaatatcatctcaatggccgcgactcgctggtgaatccaggaccagctatggccagtcacaaggacgatgaagaaaaatttttccctatgcacggcaatctaatatttggcaaagaagggacaacggcaagtaacgcagaattagataatgtaatgattacggatgaagaagagattcgtaccaccaatcctgtggcaacagagcagtatggaactgtggcaaataacttgcagagctcaaatacagctcccacgactagaactgtcaatgatcagggggccttacctggcatggtgtggcaagatcgtgacgtgtaccttcaaggacctatctgggcaaagattcctcacacggatggacactttcatccttctcctctgatgggaggctttggactgaaacatccgcctcctcaaatcatgatcaaaaatactccggtaccggcaaatcctccgacgactttcagcccggccaagtttgcttcatttatcactcagtactccactggacaggtcagcgtggaaattgagtgggagctacagaaagaaaacagcaaacgttggaatccagagattcagtacacttccaactacaacaagtctgttaatgtggactttactgtagacactaatggtgtttatagtgaacctcgccctattggaacccggtatctcacacgaaacttgtaa

SEQ ID NO: 786 - DNA, 2211 bp, Artificial Sequence
  source: /note="Description of Artificial Sequence: Synthetic polynucleotide"
atggctgctgacggttatcttccagattggctcgaggacaacctttctgaaggcattcgtgagtggtgggctctgaaacctggagtccctcaacccaaagcgaaccaacaacaccaggacaaccgtcggggtcttgtgcttccgggttacaaatacctcggacccggtaacggactcgacgaaggagagccggtcaacgaggcggacgcggcagccctcgaacacgacaaagcttacgaccagcagctcaaggccggtgacaacccgtacctcaagtacaaccacgccgacgccgagtttcaggagcgtcttcaagaagatacgtcttttgggggcaaccttggcagagcagtcttccaggccaaaaagaggatccttgagcctcttggtctggttgagggagcagctaaaacggctcctggaaagaagaggcctgtagatcagtctcctcaggaaccggactcatcatctggtgttggcaaatcgggcaaacagcctgccagaaaaagactaaatttcggtcagactggcgactcagagtcagtcccagaccctcaacctctcggagaaccaccagcagcccccacaagtttgggatctaatacaatggcttcaggcggtggcgcaccaatggcagacaataacgagggtgccgatggagtgggtaattcctcaggaaattggcattgcgattcccaatggctgggcgacagagtcatcaccaccagcaccagaacctgggccctgcccacttacaacagccacctctacaagcaaatctccagccaatcaggagcttcaaacgacaaccactactttggctacagcaccccttgggggtattttgactttaacagattccactgccacttctcaccacgtgactggcagcgactcattaacaacaactggggattccggcccaagaaactcagcttcaagctcttcaacatccaagttaaagaggtcacgcagaacgatggcacgacgactattgccaataaccttaccagcacggttcaagtgtttacggactcggagtatcagctcccgtacgtgctcgggtcggcgcaccaaggctgtctcccgccgtttccagcggacgtcttcatggtccctcagtatggatacctcaccctgaacaacggaagtcaagcggtgggacgctcatccttttactgcctggagtacttcccttcgcagatgctaaggactggaaataacttccaattcagctataccttcgaggatgtaccttttcacagcagctacgctcacagccagagtttggatcgcttgatgaatcctcttattgatcagtatctgtactacctgaacagaacgcaaggaacaacctctggaacaaccaaccaatcacggctgctttttagccaggctgggcctcagtctatgtctttgcaggccagaaattggctacctgggccctgctaccggcaacagagactttcaaagactgctaacgacaacaacaacagtaactttccttggacagcggccagcaaatatcatctcaatggccgcgactcgctggtgaatccaggaccagctatggccagtcacaaggacgatgaagaaaaatttttccctatgcacggcaatctaatatttggcaaagaagggacaacggcaagtaacgcagaattagataatgtaatgattacggatgaagaagagattcgtaccaccaatcctgtggcaacagagcagtatggaactgtggcaaataacttgcagagctcaaatacagctcccacgactagaactgtcaatgatcagggggccttacctggcatggtgtggcaagatcgtgacgtgtaccttcaaggacctatctgggcaaagattcctcacacggatggacactttcatccttctcctctgatgggaggctttggactgaaacatccgcctcctcaaatcatgatcaaaaatactccggtaccggcaaatcctccgacgactttcagcccggccaagtttgcttcatttatcactcagtactccactggacaggtcagcgtggaaattgagtgggagctacagaaagaaaacagcaaacgttggaatccagagattcagtacacttccaactacaacaagtctgttaatgtggactttactgtagacactaatggtgtttatagtgaacctcgccctattggaacccggtatctcacacgaaacttgtaa

SEQ ID NO: 787 - DNA, 2211 bp, Artificial Sequence
  source: /note="Description of Artificial Sequence: Synthetic polynucleotide"
atggctgctgacggttatcttccagattggctcgaggacaacctttctgaaggcattcgtgagtggtgggctctgaaacctggagtccctcaacccaaagcgaaccaacaacaccaggacaaccgtcggggtcttgtgcttccgggttacaaatacctcggacccggtaacggactcgacaaaggagagccggtcaacgaggcggacgcggcagccctcgaacacgacaaagcttacgaccagcagctcaaggccggtgacaacccgtacctcaagtacaaccacgccgacgccgagtttcaggagcgtcttcaagaagatacgtcttttgggggcaaccttggcagagcagtcttccaggccaaaaagaggatccttgagcctcttggtctggttgagggagcagctaaaacggctcctggaaagaagaggcctgtagatcagtctcctcaggaaccggactcatcatctggtgttggcaaatcgggcaaacagcctgccagaaaaagactaaatttcggtcagactggcgactcagagtcagtcccagaccctcaacctctcggagaaccaccagcagcccccacaagtttgggatctaatacaatggcttcaggcggtggcgcaccaatggcagacaataacgagggtgccgatggagtgggtaattcctcaggaaattggcattgcgattcccaatggctgggcgacagagtcatcaccaccagcaccagaacctgggccctgcccacttacaacagccatctctacaagcaaatctccagccaatcaggagcttcaaacgacaaccactactttggctacagcaccccttggggtattttgactttaacagattccactgccacttctcaccacgtgactggcagcgactcattaacaacaactggggattccggcccaagaaactcagcttcaagctcttcaacatccaagttaaagaggtcacgcagaacgatggcacgacgactattgccaataaccttaccagcacggttcaagtgtttacggactcggagtatcagctcccgtacgtgctcgggtcggcgcaccaaggctgtctcccgccgtttccagcggacgccttcatggtccctcagtatggatacctcaccctgaacaacggaagtcaagcggtgggacgctcatccttttactgcctggagtacttcccttcgcagatgctaaggactggaaataacttccaattcagctataccctcgaggatgtaccttttcacagcagctacgctcacagccagagtttggatcgcttgatgaatcctcttattgatcagtatctgtactacctgaacagaacgcaaggaacaacctctggaacaaccaaccaatcacggctgctttttagccaggctgggcctcagtctatgtctttgcaggccagaaattggctacctgggccctgctaccggcaacagagactttcaaagactgctaacgacaacaacaacagtaactttccttggacagcggccagcaaatatcatctcaatggccgcgactcgctggtgaatccaggaccagctatggccagtcacaaaggacgatgaagaaaaatttttccctatgcacggcaatctaatatttggcaaagaagggacaacggcaagtaacgcagaattagatagtgtaatgattacggatgaagaagagattcgtaccaccaatcctgtggcaacagagcagtatggaactgtggcaaataacttgcagagctcaaatacagctcccacgactagaactgtcaatgatcagggggccttacctggcatggtgtggcaagatcgtgacgtgtaccttcaaggacctatctgggcaaagattcctcacacggatggacactttcatccttctcctctgatgggaggctttggactgaaacatccgcctcctcaaatcatgatcaaaaatactccggtaccggcaaatcctccgacgactttcagcccggccaagtttgcttcatttatcactcagtactccactggacaggtcagcgtggaaattgagtgggagctacagaaagaaaacagcaaacgttggaatccagagattcagtacacttccaactacaacaagtctgttaatgtggactttactgtagacactaatggtgtttatagtgaacctcgccctattggaacccggtatctcacacgaaacttgtaa

SEQ ID NO: 788 - DNA, 2205 bp, Artificial Sequence
  source: /note="Description of Artificial Sequence: Synthetic polynucleotide"
atgactgacggttaccttccagattggctagaggacaacctctctgagggcgttcgagagtggtgggcgctgcaacctggagcccctaaacccaaggcaaatcaacaacatcaggacaacgctcggggtcttgtgcttccgggttacaaatacctcggacccggcaacggactcgacaagggggaacccgtcaacgcagcggacgcggcagccctcgagcacgacaaggcctacgaccagcagctcaaggccggtgacaacccctacctcaagtacaaccacgccgacgcggagttccagcagcggcttcagggcgacacatcgtttgggggcaacctcggcagagcagtcttccaggccaaaaagagggttcttgaacctcttggtctggttgagcaagcgggtgagacggctcctggaaagaagagaccgttgattgaatccccccagcagcccgactcctccacgggtatcggcaaaaaaggcaagcagccggctaaaaagaagctcgttttcgaagacgaaactggagcaggcgacggaccccctgagggatcaacttccggagccatgtctgatgacagtgagatgcgtgcagcaactggcggagctgcagtcgagggcggacaaggtgccgatggagtgggtaatgcctcgggtgattggcattgcgattccacctggtctgagggccacgtcacgaccaccagcaccagaacctgggtcttgcccacctacaacaaccacctctacaagcgactcggagagagcctgcagtccaacacctacaacggattctccaccccctggggatactttgacttcaaccgcttccactgccacttctcaccacgtgactggcagcgactcatcaacaacaactggggcatgcgacccaaagccatgcgggtcaaaatcttcaacatccaggtcaaggaggtcacgacgtcgaacggcgagacaacggtggctaataaccttaccagcacggttcagatctttgcggactcgtcgtacgaactgccgtacgtgatggatgcgggtcaagagggcagcctgcctccttttcccaacgacgtctttatggtgccccagtacggctactgtggactggtgaccggcaacacttcgcagcaacagactgacagaaatgccttctactgcctggagtactttccttcgcagatgctgcggactggcaacaactttgaaattacgtacagttttgagaaggtgcctttccactcgatgtacgcgcacagccagagcctggaccggctgatgaaccctctcatcgaccagtacctgtggggactgcaatcgaccaccaccggaaccaccctgaatgccgggactgccaccaccaactttaccaagctgcggcctaccaacctttccaactttaaaaagaactggctgcccgggccttcaatcaagcagcagggcttctcaaagactgccaatcaaaactacaagatccctgccaccgggtcagacagtctcatcaaatacgagacgcacagcactctggacggaagatggagtgccctgacccccggacctccaatggccacggctggacctgcggacagcaagttcagcaacagccagctcatctttgcggggcctaaacagaacggcaacacggccaccgtacccgggactctgatcttcacctctgaggaggagctggcagccaccaacgctaccgatacggacatgtggggcaacctacctggcggtgaccagagcaacagcaacctgccgaccgtggacagactgacagccttgggagccgtgcctggaatggtctggcaaaacagagacatttactaccagggtcccatttgggccaagattcctcataccgatggacactttcacccctcaccgctgattggtgggtttgggctgaaacacccgcctcctcaaatttttatcaagaacaccccggtacctgcgaatcctgcgacgaccttcagctctactccggtaaactccttcattactcagtacagcactggccaggtgtcggtgcagattgactgggagatccagaaggagcggtccaaacgctggaaccccgaggtccagtttacctccaactacggacagcaaaactctctgttgtgggctcccgatgcggctgggaaatacactgagcctagggctatcggtacccgctacctcacccaccacctgtaa

SEQ ID NO: 789 - DNA, 2205 bp, Artificial Sequence
  source: /note="Description of Artificial Sequence: Synthetic polynucleotide"
atgactgacggttaccttccagattggctagaggacaacctctctgaaggcgttcgagagtggtgggcgctgcaacctggagcccctaaacccaaggcaaatcaacaacatcaggacaacgctcggggtcttgtgcttccgggttacaaatacctcggacccggcaacggactcgacaagggggaacccgtcaacgcagcggacgcggcagccctcgagcacgacaaggcctacgaccagcagctcaaggccggtgacaacccctacctcaagtacaaccacgccgacgcggagttccagcagcggcttcagggcgacacatcgtttgggggcaacctcggcagagcagtcttccaggccaaaaagagggttcttgaacctcttggtctggttgagcaagcgggtgagacggctcctggaaagaagagaccgttgattgaatccccccagcagcccgactcctccacgggtatcggcaaaaaaggcaagcagccggctaaaaagaagctcgttttcgaagacgaaactggagcaggcgacggaccccctgagggatcaacttccggagccatgtctgatgacagtgagatgcgtgcagcagctggcggagctgcagtcgagggcggacaaggtgccgatggagtgggtaatgcctcgggtgattggcattgcgattccacctggtctgagggccacgtcacgaccaccagcaccagaacctgggtcttgcccacctacaacaaccacctctacaagcgactcggagagagcctgcagtccaacacctacaacggattctccaccccctggggatactttgacttcaaccgcttccactgccacttcttaccacgtgactggcagcgactcatcaacaacaactggggcgtgcgacccaaagccatgcgggtcaaaatcttcaacatccaggtcaaggaggtcacgacgtcgaacggcgagacaacggtggctaataaccttaccagcacggttcagatctttgcggactcgtcgtacgaactgccgtacgtgatggatgcgggtcaagagggcagcctgcctccttttcccaacgacgtctttatggtgccccagtacggctactgtggactggtgaccggcgacacttcgcagcaacagactgacagaaatgccttctactgcctggagtactttccttcgcagatgctgcggactggcaacaactttgaaattacgtacagttttgagaaggtgcctttccactcgatgtacgcgcacagccagagcctggaccggctgatgaaccctctcatcgaccagtacctgtggggactgcaatcgaccaccaccggaaccaccctgaatgccgggactgccaccaccaactttaccaagctgcggcctaccaacttttccaactttaaaaagaactggctgcccgggccttcaatcaagcagcagggcttctcaaagactgccaatcaaaactacaagatccctgccaccgggtcagacagtctcatcaaatacgagacgcacagcactctggacggaagatggagtgccctgacccccggacctccaatggccacggctggacctgcggacagcaagttcagcaacagccagctcatctttgcggggcctaaacagaacggcaacacggccaccgtacccgggactctgatcttcacctctgaggaggagctggcagccaccaacgccaccgatacggacatgtggggcaacctacctggcggtgaccagagcaacagcaacctgccgaccgtggacagactgacagccttgggagccgtgcctggaatggtctggcaaaacagagacatttactaccagggtcccatttgggccaagattcctcataccgatggacactttcacccctcaccgctgattggtgggtttgggctgaaacacccgcctcctcaaatttttatcaagaacaccccggtacctgcgaatcctgcgacgaccttcagctctactccggtaaactccttcattactcagtacagcactggccaggtgtcggtgcagattgactgggagatccagaaggagcggtccaaacgctggaaccccgaggtccagtttacctccaactacggacagcaaaactctctgttgtgggctcccgatgcggctgggaaatacactgagcctagggctatcggtacccgctacctcacccaccacctgtaa

SEQ ID NO: 790 - DNA, 2205 bp, Artificial Sequence
  source: /note="Description of Artificial Sequence: Synthetic polynucleotide"
atgactgacggttaccttccagattggctagaggacaacctctctgaaggcgttcgagagtggtgggcgctgcaacctggagcccctaaacccaaggcaaatcaacaacatcaggacaacgctcggggtcttgtgcttccgggttacaaatacctcggacccggcaacggactcgacgagggggaacccgtcaacgcagcggacgcggcagccctcgagcacgacaaggcctacgaccagcagctcaaggccggtgacaacccctacctcaagtacaaccacgccgacgcggagttccagcagcggcttcagggcgacacatcgtttgggggcaacctcggcagagcagtcttccaggccaaaaagagggttcttgaacctcttggtctggttgagcaagcgggtgagacggctcctggaaagaagagaccgttgattgaatccccccagcagcccgactcctccacgggtatcggcaaaaaaggcaagcagccggctaaaaagaagctcgttttcgaagacgaaactggagcaggcgacggaccccctgagggatcaacttccggagccatgtctgatgacagtgagatgcgtgcagcagctggcggagctgcagtcgagggcggacaaggtgccgatggagtgggtaatgcctcgggtgattggcattgcgattccacctggtctgagggccacgtcacgaccaccagcaccagaacctgggtcttgcccacctacaacaaccacctctacaagcgactcggagagagcctgcagtccaacacctacaacggattctccaccccctggggatactttgacttcaaccgcttccactgccacttctcaccacgtgactggcagcgactcatcaacaacaactggggcatgcgacccaaagccatgcgggtcaaaatcttcaacatccaggtcaaggaggtcacgacgtcgaacggcgagacaacggtggctaataaccttaccagcacggttcagatctttgcggactcgtcgtacgaactgccgtacgtgatggatgcgggtcaagagggcagcctgcctccttttcccaacgacgtctttatggtgccccagtacggctactgtggactggtgaccggcaacacttcgcagcaacagactgacagaaatgccttctactgcctggagtactttccttcgcagatgctgcggactggcaacaactttgaaattacgtacagttttgagaaggtgcctttccactcgatgtacgcgcacagccagagcctggaccggctgatgaaccctctcatcgaccagtacctgtggggactgcaatcgaccaccaccggaaccaccctgaatgccgggactgccaccaccaactttaccaagctgcggcctaccaacttttccaactttaaaaagaactggctgcccgggccttcaatcaagcagcagggcttctcaaagactgccaatcaaaactacaagatccctgccaccgggtcagacagtctcatcaaatacgagacgcacagcactctggacggaagatggagtgccctgacccccggacctccaatggccacggctggacctgcggacagcaagttcagcaacagccagctcatctttgcggggcctaaacagaacggcaacacggccaccgtacccgggactctgatcttcacctctgaggaggagctggcagccaccaacgctaccgatacggacatgtggggcaacctacctggcggtgaccagagcaacagcaacctgccgaccgtggacagactgacagccttgggagccgtgcctggaatggtctggcaaaacagagacatttactaccagggtcccatttgggccaagattcctcataccgatggacactttcacccctcaccgctgattggtgggtttgggctgaaacacccgcctcctcaaatttttatcaagaacaccccggtacctgcgaatcctgcgacgaccttcagctctactccggtaaactccttcattactcagtacagcactggccaggtgtcggtgcagattgactgggagatccagaaggagcggtccaaacgctggaaccccgaggtccagtttacctccaactacggacagcaaaactctctgttgtgggctcccgatgcggctgggaaatacactgagcctagggctatcggtacccgctacctcacccaccacctgtaa

SEQ ID NO: 791 - DNA, 2205 bp, Artificial Sequence
  source: /note="Description of Artificial Sequence: Synthetic polynucleotide"
atgactgacggttaccttccagattggctagaggacaacctctctgaaggcgttcgagagtggtgggcgctgcaacctggagcccctaaacccaaggcaaatcaacaacatcaggacaacgctcggggtcttgtgcttccgggttacaaatacctcggacccggcaacggactcgacaagggggaacccgtcaacgcagcggacgcggcagccctcgagcacgacaaggcctacgaccagcagctcaaggccggtgacaacccctacctcaagtacaaccacgccgacgcggagttccagcagcggcttcagggcgacacatcgtttgggggcaacctcggcagagcagtcttccaggccaaaaagagggttcttgaacctcttggtctggttgagcaagcgggtgagacggctcctggaaagaagagaccgttgattgaatccccccagcagcccgactcctccacgggtatcggcaaaaaaggcaagcagccggctaaaaagaagctcgttttcgaagacggaactggagcaggcgacggaccccctgagggatcaacttccggagccatgtctgatgacagtgagatgcgtgcagcagctggcggagctgcagtcgagggcggacaaggtgccgatggagtgggtaatgcctcgggtgattggcattgcgattccacctggtctgagggccacgtcacgaccaccagcaccagaacctgggtcttgcccacctacaacaaccacctctacaagcgactcggagagagcctgcagtccaacacctacaacggattccccaccccctggggatactttgacttcaaccgcttccactgccacttctcaccacgtgactggcagcgactcatcaacaacaactggggcatgcgacccaaagccatgcgggtcaaaatcttcaacatccaggtcaaggaggtcacgacgtcgaacggcgagacaacggcggctaataaccttaccagcacggttcagatctttgcggactcgtcgtacgaactgccgtacgtgatggatgcgggtcaagagggcagcctgcctccttttcccaacgacgtctttatggtgccccagtacggctactgtggactggtgaccggcaacacttcgcagcaacagactgacagaaatgccttctactgcctggagtactttccttcgcagatgctgcggactggcaacaactttgaaattacgtacagttttgagaaggtgcctttccactcgatgtacgcgcacagccagagcctggaccggctgatgaaccctctcatcgaccagtacctgtggggactgcaatcgaccaccaccggaaccaccctgaatgccgggactgccaccaccaactttaccaagctgcggcctaccaacttttccaactttaaaaagaactggctgcccgggccttcaatcaagcagcagggcttctcaaagactgccaatcaaaactacaagatccctgccaccgggtcagacagtctcatcaaatacgagacgcacagcactctggacggaagatggagtgccctgacccccggacctccaatggccacggctggacctgcggacagcaagttcagcaacagccagctcatctttgcggggcctaaacagaacggcaacacggccaccgtacccgggactctgatcttcacctctgaggaggagctggcagccaccaacgccaccgatacggacatgtggggcaacctacctggcggtgaccagagcaacagcaacctgccgaccgtggacagactgacagccttgggagccgtgcctggaatggtctggcaaaacagagacatttactaccagggtcccatttgggccaagattcctcataccgatggacactttcacccctcaccgctgattggtgggtttgggctgaaacacccgcctcctcaaatttttatcaagaacaccccggtacctgcgaatcctgcgacgaccttcagctctactccggtaaactccttcattactcagtacagcactggccaggtgtcggtgcagattgactgggagatccagaaggagcggtccaaacgctggaaccccgaggtccagtttacctccaactacggacagcaaaactctctgttgtgggctcccgatgcggctgggaaatacactgagcctagggctatcggtacccgctacctcacccaccacctgtaa

SEQ ID NO: 792 - DNA, 2205 bp, Artificial Sequence
  source: /note="Description of Artificial Sequence: Synthetic polynucleotide"
atgactgacggttaccttccagattggctagaggacaacctctctgaaggcgttcgagagtggtgggcgctgcaacctggagcccctaaacccaaggcaaatcaacaacatcaggacaacgctcggggtcttgtgcttccgggttacaaatacctcggacccggcaacggactcgacaagggggaacccgtcaacgcagcggacgcggcagccctcgagcacgacaaggcctacgaccagcagctcaaggccggtgacaacccctacctcaagtacaaccacgccgacgcggagttccagcagcggcttcagggcgacacatcgtttgggggcaacctcggcagagcagtcttccaggccaaaaagagggttcttgaacctcttggtctggttgagcaagcgggtgagacggctcctggaaagaagagaccgttgattgaatccccccagcagcccgactcctccacgggtatcggcaaaaaaggcaagcagccggctaaaaagaagctcgttttcgaagacgaaactggagcaggcgacggaccccctgagggatcaacttccggagccatgtctgatgacagtgagatgcgtgcagcagctggcggagctgcagtcgagggcggacaaggtgccgatggagtgggtaatgcctcgggtgattggcattgcgattccacctggtctgagggccacgtcacgaccaccagcaccagaacctgggtcttgcccacctacaacaaccacctctacaagcgactcggagagagcctgcagtccaacacctacaacggattctccaccccctggggatactttgacttcaaccgcttccactgccacttctcaccacgtgactggcagcgactcatcaacaacaactggggcatgcgacccaaagccatgcgggtcaaaatcttcaacatccaggtcaaggaggtcacgacgtcgaacggcgagacaacggtggctaataaccttaccagcacggttcagatctttgcggactcgtcgtacgaactgccgtacgtgatggatgcgggtcaagagggcagcctgcctccttttcccaacgacgtctttatggtgccccagtacggctaccgtggactggtgaccggcaacacttcgcagcaacagactgacagaaatgccttctactgcctggagtactttccttcgcagatgctgcggactggcaacaactttgaaattacgtacagttttgagaaggtgcctttccactcgatgtacgcgcacagccagagcctggaccggctgatgaaccctctcatcgaccagtacctgtggggactgcaatcgaccaccaccggaaccaccctgaatgccgggactgccaccaccaactttaccaagctgcggcctaccaacttttccaactttaaaaagaactggctgcccgggccttcaatcaagcagcagggcttctcaaagactgccaatcaaaactacaagatccctgccaccgggtcagacagtctcatcaaatacgagacgcacagcactctggacggaagatggagtgccctgacccccggacctccaatggccacggctggacctgcggacagcaagttcagcaacagccagctcatctttgcggggcctaaacagaacggcaacacggccaccgtacccgggactctgatcttcacctctgaggaggagctggcagccaccaacgccaccgatacggacatgtggggcaacctacctggcggtgaccagagcaacagcaacctgccgaccgtggacagactgacagccttgggagccgtgcctggaatggtctggcaaaacagagacatttactaccagggtcccatttgggccaagattcctcataccgatggacactttcacccctcaccgctgattggtgggtttgggctgaaacacccgcctcctcaaatttttatcaagaacaccccggtacctgcgaatcctgcgacgaccttcagctctactccggtaaactccttcattactcagtacagcactggccaggtgtcggtgcagattgactgggagatccagaaggagcggtccaaacgctggaaccccgaggtccagtttacctccaactacggacagcaaaactctctgttgtgggctcccgatgcggctgggaaatacactgagcctagggctatcggtacccgctacctcacccaccacctgtaa

SEQ ID NO: 793 - DNA, 2205 bp, Artificial Sequence
  source: /note="Description of Artificial Sequence: Synthetic polynucleotide"
atgactgacggttaccttccagattggctagaggacaacctctctgaaggcgttcgagagtggtgggcgctgcaacctggagcccctaaacccaaggcaaatcaacaacatcaggacaacgctcggggtcttgtgcttcagggttacaaatacctcggacccggcaacggactcgacaagggggaacccgtcaacgcagcggacgcggcagccctcgagcacgacaaggcctacgaccagcagctcaaggccggtgacaacccctacctcaagtacaaccacgccgacgcggagttccagcagcggcttcagggcgacacatcgtttgggggcaacctcggcagagcagtcttccaggccaaaaagagggttcttgaaccccttggtctggttgagcaagcgggtgagacggctcctggaaagaagagaccgttgattgaatccccccagcagcccgactcctccacgggtatcggcaaaaaaggcaagcagccggctaaaaagaagctcgttttcgaagacgaaactggagcaggcgacggaccccctgagggatcaacttccggagccatgtctgatgacagtgagatgcgtgcagcagctggcggagctgcagtcgagggcggacaaggtgccgatggagtgggtaatgcctcgggtgattggcattgcgattccacccggtctgagggccacgtcacgaccaccagcaccagaacctgggtcttgcccacctacaacaaccacctctacaagcgactcggagagagcctgcagtccaacacctacaacggattctccaccccctggggatactttgacttcaaccgcttccactgccacttctcaccacgtgactggcagcgactcatcaacaataactggggcatgcgacccaaagccatgcgggtcaaaatcttcaacatccaggtcaaggaggtcacgacgtcgaacggcgagacaacggtggctaataaccttaccagcacggttcagatctttgcggactcgtcgtacgaactgccgtacgtgatggatgcgggtcaagagggcagcctgcctccttttcccaacgacgtctttatggtgccccagtacggctactgtggactggtgaccggcaacacttcgcagcaacagactgacagaaatgccttctactgcctggagtactttccttcgcagatgctgcggactggcaacaactttgaaattacgtacagttttgagaaggtgcctttccactcgatgtacgcgcacagccagagcctggaccggctgatgaaccctctcatcgaccagtacctgtggggactgcaatcgaccaccaccggaaccaccctgaatgccgggactgccaccaccaactttaccaagctgcggcctaccaacttttccaactttaaaaagaactggctgcccgggccttcaatcaagcagcagggcttctcaaagactgccaatcaaaactacaagatccctgccaccgggtcagacagtctcatcaaatacgagacgcacagcactctggacggaagatggagtgcccggacccccggacctccaatggccacggctggacctgcggacagcaagttcagcaacagccagctcatctttgcggggcctaaacagaacggcaacacggccaccgtacccgggactctgatcttcacctctgaggaggagctggcagccaccaacgccaccgatacggacatgtggggcaacctacctggcggtgaccagagcaacagcaacctgccgaccgtggacagactgacagccttgggagccgtgcctggaatggtctggcaaaacagagacatttactaccagggtcccatttgggccaagattcctcataccgatggacactttcacccctcaccgctgattggtgggtttgggctgaaacacccgcctcctcaaatttttatcaagaacaccccggtacctgcgaatcctgcgacgaccttcagctctactccggtaaactccttcattactcagtacagcactggccaggtgtcggtgcagattgactgggagatccagaaggagcggtccaaacgctggaaccccgaggtccagtttacctccaactacggacagcaaaactctctgttgtgggctcccgatgcggctgggaaatacactgagcctagggctatcggtacccgctacctcacccaccacctgtaa

SEQ ID NO: 794 - DNA, 2175 bp, Artificial Sequence
  source: /note="Description of Artificial Sequence: Synthetic polynucleotide"
atgtcttttgttgatcaccctccagattggttggaagaagttggtgaaggtcttcgcgagtttttgggccttgaagcgggcccaccgaaaccaaaacccaatcagcagcatcaagatcaagcccgtggtcttgtgctgcctggttataactatctcggacccggaaacggtctcgatcgaggagagcctgtcaacagggcagacgaggtcgcgcgagagcacgacatctcgtacaacgagcagcttgaggcgggagacaacccctacctcaagtacaaccacgcggacgccgagtttcaggagaggctcgccgacgacacatccttcgggggaaacctcggaaaggcagtctttcaggccaagaaaagggttctcgaaccttttggcctggttgaagagggtgctaagacggcccctaccggaaagcggatagacgaccactttccaaaaagaaagaaggcccggaccgaagaggactccaagccttccacctcgtcagacgccgaagctggacccagcggatcccagcagctgcaaatcccagcccaaccagcctcaagtttgggagctgatacaatgtctgcgggaggtggcggcccattgggcgacaataaccaaggtgccgatggagtgggcaatgcctcgggagattggcattgcgattccacgtggatgggggacagagtcgtcaccaagtccacccgaacctgggtgctgcccagctacaacaaccaccagtaccgagagatcaaaagcggctccgtcgacggaagcaacgccaacgcctactttggatacagcaccccctgggggtactttgactttaaccgcttccacagccactggagcccccgagactggcaaagactcatcaacaactactggggcttcagaccccggtccctcagagtcaaaatcttcaacattcaagtcaaagaggtcacggtgcaggactccaccaccaccatcgccaacaacctcacctccaccgtccaagtgtttacggacgacgactaccagctgccctacgtcgtcggcaacgggaccgagggatgcctgccggccttccctccgcaggtctttacgctgccgcagtacggttacgcgacgctgaaccgcgacaacacagaaaatcccaccgagaggagcagcttcttctgcctagagtactttcccagcaagatgctgagaacgggcaacaactttgagtttacctacaactttgaggaggtgcccttccactccagcttcgctcccagtcagaacctcttcaagctggccaacccgctggtggaccagtacttgtaccgcttcgtgagcacaaataacactggcggagtccagttcaacaagaacctggccgggagatacgccaacacctacaaaaactggttcccggggcccatgggccgaacccagggctggaacctgggctccggggtcaaccgcgccagtgtcagcgccttcgccacgaccaataggatggagctcgagggcgcgagttaccaggtgcccccgcagccgaacggcatgaccaacaacctccagggcagcaacacctatgccctggagaacactatgatcttcaacagccagccggcgaacccgggcaccaccgccacgtacctcgagggcaacatgctcatcaccagcgagagcgagacgcagccggtgaaccgcgtggcgtacaacgtcggcgggcagatggccaccaacaaccagagctccaccactgcccccgcgaccggcacgtacaacctccaggaaatcgtgcccggcagcgtgtggatggagagggacgtgtacctccaaggacccatctgggccaagatcccagagacggaggcgcactttcacccctctccggccatgggcggattcggactcaaacacccaccgcccatgatgctcatcaagaacacgcctgtgcccggaaatatcaccagcttctcggacgtgcccgtcagcagcttcatcacccagtacagcaccgggcaggtcaccgtggagatggagtgggagctcaagaaggaaaactccaagaggtggaacccagagatccagtacacaaacaactacaacgacccccagtttgtggactttgccccggacagcaccggggaatacagaaccaccagacctatcggaacccgataccttacccgacccctttaa

SEQ ID NO: 795 - DNA, 2175 bp, Artificial Sequence
  source: /note="Description of Artificial Sequence: Synthetic polynucleotide"
atgtcttttgttgatcaccctccagattggttggaagaagttggtgaaggtcttcgcgagtttttgggccttgaagcgggcccaccgaaaccaaaacccaatcagcagcatcaagatcaagcccgtggtcttgtgctgcctggttataactatctcggacccggaaacggtctcgatcgaggagagcctgtcaacagggcagacgaggtcgcgcgagagcacgacatctcgtacaacgagcagcttgaggcgggagacaacccctacctcaagtacaaccacgcggacgccgagtttcaggagaagctcgccgacgacacatcctccgggggaaacctcggaaaggcagtctttcaggccaagaaaagggttctcgaaccttttggcctggttgaagagggtgctaagacggcccctaccggaaagcggatagacgaccactttccaaaaagaaagaaggcccggaccgaagaggactccaagccttccacctcgtcagacgccgaagctggacccagcggatcccagcagctgcaaatcccagcccaaccagcctcaagtttgggagctgatacaatgtctgcgggaggtggcggcccattgggcgacaataaccaaggtgccgatggagtgggcaatgcctcgggagattggcattgcgattccacgtggatgggggacagagtcgtcaccaagtccacccgaacctgggtgctgcccagctacaacaaccaccagtaccgagagatcaaaagcggctccgtcgacggaagcaacgccaacgcctactttggatacagcaccccctgggggtactttgactttaaccgcttccacagccactggagcccccgagactggcaaagactcatcaacaactactggggcttcagaccccggtccctcagagtcaaaatcttcaacattcaagtcaaagaggtcacggtgcaggactccaccaccaccatcgccaacaacctcacctccaccgtccaagtgtttacggacgacgactaccagctgccctacgtcgtcggcaacgggaccgagggatgcctgccggccttccctccgcaggtctttacgctgccgcagtacggttacgcgacgctgaaccgcgacaacacagaaaatcccaccgagaggagcagcttcttctgcctagagtactttcccagcaagatgctgagaacgggcaacaactttgagtttacctacaactttgaggaggtgcccttccactccagcttcgctcccagtcagaacctcttcaagctggccaacccgctagtggaccagtacttgtaccgcttcgtgagcacaaataacactggcggagtccagttcaacaagaacctggccgggagatacgccaacacctacaaaaactggttcccggggcccatgggccgaacccagggctggaacctgggctccggggtcaaccgcgccagtgtcagcgccttcgccacgaccaataggatggagctcgagggcgcgagttaccaggtgcccccgcagccgaacggcatgaccaacaacctccagggcagcaacacctatgccctggagaacactatgatcttcaacagccagccggcgaacccgggcaccaccgccacgtacctcgagggcaacatgctcatcaccagcgagagcgagacgcagccggtgaaccgcgtggcgtacaacgtcggcgggcagatggccaccaacaaccagagctccaccactgcccccgcgaccggcacgtacaacctccaggaaatcgtgcccggcagcgtgtggatggagagggacgtgtacctccaaggacccatctgggccaagatcccagagacgggggcgcactttcacccctctccggccatgggcggattcggactcaaacacccaccgcccatgatgctcatcaagaacacgcctgtgcccggaaatatcaccagcttctcggacgtgcccgtcagcagcttcatcacccagtacagcaccgggcaggtcaccgtggagatggagtgggagctcaagaaggaaaactccaagaggtggaacccagagatccagtacacaaacaactacaacgacccccagtttgtggactttgccccggacagcaccggggaatacagaaccaccagacctatcggaacccgataccttacccgacccctttaa

SEQ ID NO: 796 - DNA, 2175 bp, Artificial Sequence
  source: /note="Description of Artificial Sequence: Synthetic polynucleotide"
atgtcttttgttgatcaccctccagattggttggaagaagttggtgaaggtcttcgcgagtttttgggccttgaagcgggcccaccgaaaccaaaacccaatcagcagcatcaagatcaagcccgtggtcttgtgctgcctggttataactatctcggacccggaaacggtctcgatcgaggagagcctgtcaacagggcagacgaggtcgcgcgagagcacgacatctcgtacaacgagcagcttgaggcgggagacaacccctacctcaagtacaaccacgcggacgccgagtttcaggagaagctcgccgacgacacatccttcgggggaaacctcggaaaggcagtctttcaggccaagaaaagggttctcgaaccttttggcctggttgaagagggtgctaagacggcccctaccggaaagcggatagacgaccactttccaaaaagaaagaaggcccggaccgaagaggactccaagccttccacctcgtcagacgccgaagctggacccagcggatcccagcagctgcaaatcccagcccaaccagcctcaagtttgggagctgatacaatgtctgcgggaggtggcggcccattgggcgacaataaccaaggtgccgatggagtgggcaatgcctcgggagattggcattgcgattccacgtggatgggggacagagtcgtcaccaagtccacccgaacctgggtgctgcccagctacaacaaccaccagtaccgagagatcaaaagcggctccgtcgacggaagcaacgccaacgcctactttggatacagcaccccctgggggtactttgactttaaccgcttccacagccactggagcccccgagactggcaaagactcatcaacaactactggggcttcagaccccggtccctcagagtcaaaatcttcaacattcaagtcaaagaggtcacggtgcaggactccaccaccaccatcgccaacaacctcacctccaccgtccaagtgtttacggacgacgactaccagctgccctacgtcgtcggcaacgggaccgagggatgcctgccggccttccctccgcaggtctttacgctgccgcagtacggttacgcgacactgaaccgcgacaacacagaaaatcccaccgagaggagcagcttcttctgcctagagtactttcccagcaagatgctgagaacgggcaacaactttgagtttacctacaactttgaggaggtgcccttccactccagcttcgctcccagtcagaacctcttcaagctggccaacccgctggtggaccagtacttgtaccgcttcgtgagcacaaataacactggcggagtccagttcaacaagaacctggccgggagatacgccaacacctacaaaaactggttcccggggcccatgggccgaacccagggctggaacctgggctccggggtcaaccgcgccagtgtcagcgccttcgccacgaccaataggatggagctcgagggcgcgagttaccaggtgcccccgcagccgaacggcatgaccaacaacctccagggcagcaacacctatgccctggagaacactatgatcttcaacagccagccggcgaacccgggcaccaccgccacgtacctcgagggcaacatgctcatcaccagcgagagcgagacgcagccggtgaaccgcgtggcgtacaacgtcggcgggcagatggccaccaacaaccagagctccaccactgcccccgcgaccggcacgtacaacctccaggaaatcgtgcccggcagcgtgtggatggagagggacgtgtacctccaaggacccatctgggccaagatcccagagacgggggcgcactttcacccctctccggccatgggcggattcggactcaaacacccaccgcccatgatgctcatcaagagcacgcctgtgcccggaaatatcaccagcttctcggacgtgcccgtcagcagcttcatcacccagtacagcaccgggcaggtcaccgtggagatggagtgggagctcaagaaggaaaactccaagaggtggaacccagagatccagtacacaaacaactacaacgacccccagtttgtggactttgccccggacagcaccggggaatacagaaccaccagacctatcggaacccgataccttacccgacccctttaa

SEQ ID NO: 797 - DNA, 2175 bp, Artificial Sequence
  source: /note="Description of Artificial Sequence: Synthetic polynucleotide"
atgtcttttgttgatcaccctccagattggttggaagaagttggtgaaggtcttcgcgagtttttgggccctgaagcgggcccaccgaaaccaaaacccaatcagcagcatcaagatcaagcccgtggtcttgtgctgcctggttataactatctcggacccggaaacggtctcgatcgaggagagcctgtcaacagggcagacgaggtcgcgcgagagcacgacatctcgtacaacgagcagcttgaggcgggagacaacccctacctcaagtacaaccacgcggacgccgagtttcaggagaagctcgccgacgacacatccttcgggggaaacctcggaaaggcagtctttcaggccaagaaaagggttctcgaaccttttggcctggttgaagagggtgctaagacggcccctaccggaaagcggatagacgaccactttccaaaaagaaagaaggtccggaccgaagaggactccaagccttccacctcgtcagacgccgaagctggacccagcggatcccagcagctgcaaatcccagcccaaccagcctcaagtttgggagctgatacaatgtctgcgggaggtggcggcccattgggcgacaataaccaaggtgccgatggagtgggcaatgcctcgggagattggcattgcgattccacgtggatgggggacagagtcgtcaccaagtccacccgaacctgggtgccgcccagctacaacaaccaccagtaccgagagatcaaaagcggctccgtcgacggaagcaacgccaacgcctactttggatacagcaccccctgggggtactttgactttaaccgcttccacagccactggagcccccgagactggcaaagactcatcaacaactactggggcttcagaccccggtccctcagagtcaaaatcttcaacattcaagtcaaagaggtcacggtgcaggactccaccaccaccatcgccaacaacctcacctccaccgtccaagtgtttacggacgacgactaccagctgccctacgtcgtcggcaacgggaccgagggatgcctgccggccttccctccgcaggtctttacgctgccgcagtacggttacgcgacgctgaaccgcgacaacacagaaaatcccaccgagaggagcagcttcttctgcctagagtactttcccagcaagatgctgagaacgggcaacaactttgagtttacctacaactttgaggaggtgcccttccactccagcttcgctcccagtcagaacctcttcaagctggccaacccgctggtggaccagtacttgtaccgcttcgtgagcacaaataacactggcggagtccagttcaacaagaacctggccgggagatacgccaacacctacaaaaactggttcccggggcccatgggccgaacccagggctggaacctgggctccggggtcaaccgcgccagtgtcagcgccttcgccacgaccaataggatggagctcgagggcgcgagttaccaggtgcccccgcagccgaacggcatgaccaacaacctccagggcagcaacacctatgccctggagaacactatgatcttcaacagccagccggcgaacccgggcaccaccgccacgtacctcgagggcaacatgctcatcaccagcgagagcgagacgcagccggtgaaccgcgtggcgtgcaacgtcggcgggcagatggccaccaacaaccagagctccaccactgcccccgcgaccggcacgtacaacctccaggaaatcgtgcccggcagcgtgtggatggagagggacgtgtacctccaaggacccatctgggccaagatcccagagacgggggcgcactttcacccctctccggccatgggcggattcggactcaaacacccaccgcccatgatgctcatcaagaacacgcctgtgcccggaaatatcaccagcttctcggacgtgcccgtcagcagcttcatcacccagtacagcaccgggcaggtcaccgtggagatggagtgggagctcaagaaggaaaactccaagaggtggaacccagagatccagtacacaaacaactacaacgacccccagtttgtggactttgccccggacagcaccggggaatacagaaccaccagacctattggaacccgataccttacccgacccctttaa

SEQ ID NO: 798 - DNA, 2175 bp, Artificial Sequence
  source: /note="Description of Artificial Sequence: Synthetic polynucleotide"
atgtcttttgttgatcaccctccagattggttggaagaagttggtgaaggtcttcgcgagtttttgggccttgaagcgggcccaccgaaaccaaaacccaatcagcagcatcaagatcaagcccgtggtcttgtgctgcctggttataactatctcggacccggaaacggtctcgatcgaggagagcctgtcaacagggcagacgaggtcgcgcgagagcacgacatctcgtacaacgagcagcttgaggcgggagacaacccctacctcaagtacaaccacgcggacgccgagtttcaggagaagctcgccgacgacacatccttcgggggaaacctcggaaaggcagtctttcaggccaagaaaagggttctcgaaccttttggcctggttgaagagggtgctaagacggcccctaccggaaagcggatagacgaccactttccaaaaagaaagaaggcccggaccgaagaggactccaagccttccacctcgtcagacgccgaagctggacccagcggatcccagcagctgcaaatcccagcccaaccagcctcaagtttgggagctgatacaatgtctgcgggaggtggcggcccattgggcgacaataaccaaggtgccgatggagtgggcaatgcctcgggagattggcattgcgattccacgtggatgggggacagagtcgtcaccaagtccacccgaacctgggtgctgcccagctacaacaaccaccagtaccgagagatcaaaagcggctccgtcgacggaagcaacgccaacgcctactttggatacagcaccccctgggggtactttgactttaaccgcttccacagccactggagcccccgagactggcaaagactcatcaacaactactggggcttcagaccccggtccctcagagtcaaaatcttcaacattcaagtcaaagaggtcacggtgcaggactccaccaccaccatcgccaacaacctcacctccaccgtccaagtgtttacggacgacgactaccagctgccctacgtcgtcggcaacgggaccgagggatgcctgccggccttccctccgcaggtctttacgctgccgcagtacggttacgcgacgctgaaccgcgacaacaccgaaaatcccaccgagaggagcagcttcttctgcctagagtactttcccagcaagatgctgagaacgggcaacaactttgagtttacctacaactttgaggaggtgcccttccactccagcttcgctcccagtcagaacctcttcaagctggccaacccgctggtggaccagtacttgtaccgcttcgtgagcacaaataacactggcggagtccagttcaacaagaacctggccgggagatacgccaacacctacaaaaactggttcccggggcccatgggccgaacccagggctggaacctgggctccggggtcaaccgcgccagtgtcagcgccttcgccacgaccaataggatggagctcgagggcgcgagttaccaggtgcccccgcagccgaacggcatgaccaacaacctccagggcagcaacacctatgccctggagaacactatgatcttcaacagccagccggcgaacccgggcaccaccgccacgtacctcgagggcaacatgctcatcaccagcgagagcgagacgcagccggtgaaccgcgtggcgtacaacgtcggcgggcagatggccaccaacaaccagagctccaccactgcccccgcgaccggcgcgtacaacctccaggaaatcgtgcccggcagcgtgtggatggagagggacgtgtacctccaaggacccatctgggccaagatcccagagacgggggcgcactttcacccctctccggccatgggcggattcggactcaaacacccaccgcccatgatgctcatcaagaacacgcctgtgcccggaaatatcaccagcttctcggacgtgcccgtcagcagcttcatcacccagtacagcaccgggcaggtcaccgtggagatggagtgggagctcaagaaggaaaactccaagaggtggaacccagagatccagtacacaaacaactacaacgacccccagtttgtggactttgccccggacagcaccggggaatacagaaccaccagacctatcggaacccgataccttacccgacccctttaa

SEQ ID NO: 799 - DNA, 2175 bp, Artificial Sequence
  source: /note="Description of Artificial Sequence: Synthetic polynucleotide"
atgtcttttgttgatcaccctccagattggttggaagaagttggtgaaggtcttcgcgagtttttgggccttgaagcgggcccaccgaaaccaaaacccaatcagcagcatcaagatcaagcccgtggtcttgtgctgcctggttataactatctcggacccggaaacggtctcgatcgaggagagcctgtcaacagggcagacggggtcgcgcgagagcacgacatctcgtacaacgagcagcttgaggcgggagacaacccctacctcaagtacaaccacgcggacgccgagtttcaggagaagctcgccgacgacacatccttcgggggaaacctcggaaaggcagtctttcaggccaagaaaagggttctcgaaccttttggcctggttgaagagggtgctaagacggcccctaccggaaagcggatagacgaccactttccaaaaagaaagaaggcccggaccgaagaggactccaagccttccacctcgtcagacgccgaagctggacccagcggatcccagcagctgcaaatcccagcccaaccagcctcaagtttgggagctgatacaatgtctgcgggaggtggcggcccattgggcgacaataaccaaggtgccgatggagtgggcaatgcctcgggagattggcattgcgattccacgtggatgggggacagagtcgtcaccaagtccacccgaacctgggtgctgcccagctacaacaaccaccagtaccgagagatcaaaagcggctccgtcgacggaagcaacgccaacgcctactttggatacagcaccccctgggggtactttgactttaaccgcttccacagccactggagcccccgagactggcaaagactcatcaacaactactggggcttcagaccccggtccctcagagtcaaaatcttcaacattcaagtcaaagaggtcacggtgcaggactccaccaccaccatcgccaacaacctcacctccaccgtccaagcgtttacggacgacgactaccagctgccctacgtcgtcggcaacgggaccgagggatgcctgccggccttccctccgcaggtctttacgctgccgcagtacggttacgcgacgctgaaccgcgacaacacagaaaatcccaccgagaggagcagcttcttctgcctagagtactttcccagcaagatgctgagaacgggcaacaactttgagtttacctacaactttgaggaggtgcccttccactccagcttcgctcccagtcagaacctcttcaagctggccaacccgctggtggaccagtacttgtaccgcttcgtgagcacaaataacactggcggagtccagttcaacaagaacctggccgggagatacgccaacacctacaaaaactggttcccggggcccatgggccgaacccagggctggaacctgggctccggggtcaaccgcgccagtgtcagcgccttcgccacgaccaataggatggagctcgagggcgcgagttaccaggtgcccccgcagccgaacggcatgaccaacaacctccagggcagcaacacctatgccctggagaacactatgatcttcaacagccagccggcgaacccgggcaccaccgccacgtacctcgagggcaacatgctcatcaccagcgagagcgagacgcagccggtgaaccgcgtggcgtacaacgtcggcgggcagatggccaccaacaaccagagctccaccactgcccccgcgaccggcacgtacaacctccaggaaatcgtgcccggcagcgtgtggatggagagggacgtgtacctccaaggacccatctgggccaagatcccagagacgggggcgcactttcacccctctccggccatgggcggattcggactcaaacacccaccgcccatgatgctcatcaagaacacgcctgtgcccggaaatatcaccagcttctcggacgtgcccgtcagcagcttcatcacccagtacagcaccgggcaggtcaccgtggagatggagtgggagctcaagaaggaaaactccaagaggtggaacccagagatccagtacacaaacaactacaacgacccccagtttgtggactttgccccggacagcaccggggaatacagaaccaccagacctatcggaacccgataccttacccgacccctttaa

SEQ ID NO: 800 - DNA, 2175 bp, Artificial Sequence
  source: /note="Description of Artificial Sequence: Synthetic polynucleotide"
atgtcttttgttgatcaccctccagattggttggaagaagttggtgaaggtcttcgcgagtttttgggccttgaagcgggcccaccgaaaccaaaacccaatcagcagcatcaagatcaagcccgtggtcttgtgctgcctggttataactatctcggacccggaaacggtctcgatcgaggagagcctgtcaacagggcagacgaggtcgcgcgagagcacgacatctcgtacaacgagcagcttgaggcgggagacaacccctacctcaagtacaaccacgcggacgccgagtttcaggagaagctcgccgacgacacatccttcgggggaaacctcggaaaggcagtctttcaggccaagaaaagggttctcgaaccttttggcctggttgaagagggtgctaagacggcccctaccggaaagcggatagacgaccactttccaaaaagaaagaaggcccggaccgaagaggactccaagccttccacctcgtcagacgccgaagctggacccagcggatcccagcagctgcaaatcccagcccaaccagcctcaagtttgggagctgatacaatgtctgcgggaggtggcggcccattgggcgacaataaccaaggtgccgatggagtgggcaatgcctcgggagattggcattgcgattccacgtggatgggggacagagtcgtcaccaagtccacccgaacctgggtgctgcccagctacaacaaccaccagtaccgagagatcaaaagcggctccgtcgacggaagcaacgccaacgcctactttggatacagcaccccctgggggtactttgactttaaccgcttccacagccactggagcccccgagactggcaaagactcatcaacaactactggggcttcagaccccggtccctcagagtcaaaatcttcaacattcaagtcaaagaggtcacggtgcaggactccaccaccaccatcgccaacaacctcacctccaccgtccaagtgtttacggacgacgactaccagctgccctacgtcgtcggcaacgggaccgagggatgcctgccggccttccctccgcaggtctttacgctgccgcagtacggttacgcgacgctgaaccgcgacaacacagaaaatcccaccgagaggagcagcttcttctgcctagagtactttcccagcaagatgctgagaacgggcaacaactttgagtttacctacaactttgaggaggtgcccttccactccagcttcgctcccagtcagaacctcttcaagctggccaacccgctggtggaccagtacttgtaccgcttcgtgagcacaaataacactggcggagtccagttcaacaagaacctggccgggagatacgccaacacctacaaaaactggttcccggggcccatgggccgaacccagggctggaacctgggctccggggtcaaccgcgccagtgtcagcgccttcgccacgaccaataggatggagctcgagggcgcgagttactaggtgcccccgcagccgaacggcatgaccaacaacctccagggcagcaacacctatgccctggagaacactatgatcttcaacagccagccggcgaacccgggcaccaccgccacgtacctcgagggcaacatgctcatcaccagcgagagcgagacgcagccggtgaaccgcgtggcgtacaacgtcggcgggcagatggccaccaacaaccagagctccaccactgcccccgcgaccggcacgtacaacctccaggaaatcgtgcccggcagcgtgtggatggagggggacgtgtacctccaaggacccatctgggccaagatcccagagacgggggcgcactttcacccctctccggccatgggcggattcggactcaagcacccaccgcccatgatgctcatcaagaacacgcctgtgcccggaaatatcaccagcttctcggacgtgcccgtcagcagcttcatcacccagtacagcaccgggcaggtcaccgtggagatggagtgggagctcaagaaggaaaactccaagaggtggaacccagagatccagtacacaaacaactacaacgacccccagtttgtggactttgccccggacagcaccggggaatacagaaccaccagacctatcggaacccgataccttacccgacccctttaa

SEQ ID NO: 801 - DNA, 2175 bp, Artificial Sequence
  source: /note="Description of Artificial Sequence: Synthetic polynucleotide"
atgtcttttgttgatcaccctccagattggttggaagaagttggtgaaggtcttcgcgagtttttgggccttgaagcgggcccaccgaaaccaaaacccaatcagcagcatcaagatcaagcccgtggtcttgtgctgcctggttataactatctcggacccggaaacggtctcgatcgaggagagcctgtcaacagggcagacgaggtcgcgcgagagcacgacatctcgtacaacgagcagcttgaggcgggagacaacccctacctcaagtacaaccacgcggacgccgagtttcaggagaagctcgccgacgacacatccttcgggggaaacctcggaaaggcagtctttcaggccaagaaaagggttctcgaaccttttggcctggttgaagagggtgctaagacggcccctaccggaaagcggatagacgaccactttccaaaaagaaagaaggtccggaccgaagaggactccaagccttccacctcgtcagacgccgaagctggacccagcggatcccagcagctgcaaatcccagcccaaccagcctcaagtttgggagctgatacaatgtctgcgggaggtggcggcccattgggcgacaataaccaaggtgccgatggagtgggcaatgcctcgggagattggcattgcgattccacgtggatgggggacagagtcgtcaccaagtccacccgaacctgggtgctgcccagctacaacaaccaccagtaccgagagatcaaaagcggctccgtcgacggaagcaacgccaacgcctactttggatacagcaccccctgggggtactttgactttaaccgcttccacagccactggagcccccgagactggcaaagactcatcaacaactactggggcttcagaccccggtccctcagagtcaaaatcttcaacattcaagtcaaagaggtcacggtgcaggactccaccaccaccatcgccaacaacctcacctccaccgtccaagtgtttacggacgacgactaccagctgccctacgtcgtcggcaacgggaccgagggatgcctgccggccttccctccgcaggtctttacgctgccgcagtacggttacgcgacgctgaaccgcgacaacacagaaaatcccaccgagaggagcagcttcttctgcctagagtactttcccagcaagatgctgagaacgggcaacaactttgagtttacctacaactttgaggaggtgcccttccactccagcttcgctcccagtcagaacctcttcaagctggccaacccgctggtggaccagtacttgtaccgcttcgtgagcacaaataacactggcggagtccagttcaacaagaacctggccgggagatacgccaacacctacaaaaactggttcccggggcccatgggccgaacccagggctggaacctgggctccggggtcaaccgcgccagtgtcagcgccttcgccacgaccaataggatggagctcgagggcgcgagttaccaggtgcccccgcagccgaacggcatgaccaacaacctccagggcagcaacacctatgccctggagaacactatgatcttcaacagccagccggcgaacccgggcaccaccgccacgtacctcgagggcaacatgctcatcaccagcgagagcgagacgcagccggtgaaccgcgtggcgtacaacgtcggcgggcagatggccaccaacaaccagagctccaccactgcccccgcgaccggcacgtacaacctccaggaaatcgtgcccggcagcgtgtggatggagagggacgtgtacctccaaggacccatctgggccaagatcccagagacgggggcgcactttcacccctctccggccatgggcggattcggactcaaacacccaccgcccatgatgctcatcaagaacacgcctgtgcccggaaatatcaccagcttctcggacgtgcccgtcagcagcttcatcacccagtacagcaccgggcaggtcaccgtggagatggagtgggagctcaagaaggaaaactccgagaggtggaacccagagatccagtacacaaacaactacaacgacccccagtttgtggactttgccccggacagcaccggggaatacagaaccaccagacctattggaacccgataccttacccgacccctttaa

SEQ ID NO: 802 - DNA, 2175 bp, Artificial Sequence
  source: /note="Description of Artificial Sequence: Synthetic polynucleotide"
atgtcttttgttgatcaccctccagattggttggaagaagttggtgaaggtcttcgcgagtttttgggccttgaagcgggcccaccgaaaccaaaacccaatcagcagcatcaagatcaagcccgtggtcttgtgctgcctggttataactatctcggacccggaaacggtctcgatcgaggagagcctgtcaacagggcagacgaggtcgcgcgagagcacgacatctcgtacagcgagcagcttgaggcgggagacaacccctacctcaagtacaaccacgcggacgccgagtttcaggagaagctcgccgacgacacatccttcgggggaaacctcggaaaggcagtctttcaggccaagaaaagggttctcgaaccttttggcctggttgaagagggtgctaagacggcccctaccggaaagcggatagacgaccactttccaaaaagaaagaaggcccggaccgaagaggactccaagccttccacctcgtcagacgccgaagctggacccagcggatcccagcagctgcaaatcccagcccaaccagcctcaagtttgggagctgatacaatgtctgcgggaggtggcggcccattgggcgacaataaccaaggtgccgatggagtgggcaatgcctcgggagattggcattgcgattccacgtggatgggggacagagtcgtcaccaagtccacccgaacctgggtgctgcccagctacaacaaccaccagtaccgagagatcaaaagcggctccgtcgacggaagcaacgccaacgcctactttggatacagcaccccctgggggtactttgactttaaccgcttccacagccactggagcccccgagactggcaaagactcatcaacaactactggggcttcagaccccggtccctcagagtcaaaatcttcaacattcaagtcaaagaggtcacggtgcaggactccaccaccaccatcgccaacaacctcacctccaccgtccaagtgtttacggacgacgactaccagctgccctacgtcgtcggcaacgggaccgagggatgcctgccggccttccctccgcaggtctttacgctgccgcagtacggttacgcgacgctgaaccgcgacaacacagaaaatcccaccgagaggagcagcttcttctgcctagagtactttcccagcaagatgctgagaacgggcaacaactttgagtttacctacaactttgaggaggtgcccttccactccagcttcgctcccagtcagaacctcttcaagctggccaacccgctggtggaccagtacttgtaccgcttcgtgagcacaaataacactggcggagtccagttcaacaagaacctggccgggagatacgccaacacctacaaaaactggttcccggggcccatgggccgaacccagggctggaacctgggctccggggtcaaccgcgccagtgtcagcgccttcgccacgaccaataggatggagctcgagggcgcgagttaccaggtgcccccgcagccgaacggcatgaccaacaacctccagggcagcaacacctatgccctggagaacactatgatcttcaacagccagccggcgaacccgggcaccaccgccacgtacctcgagggcaacatgctcatcaccagcgagagcgagacgcagccggtgaaccgcgtggcgtacaacgtcggcgggcagatggccaccaacaaccagagctccaccactgcccccgcgaccggcacgtacaacctccaggaaatcgtgcccggcagcgtgtggatggagagggacgtgtacctccaaggacccatctgggccaagatcccagagacgggggcgcactttcacccctctccggccatgggcggattcggactcaaacacccaccgcccatgatgctcatcaagaacacgcctgtgcccggaaatatcaccagcttctcggacgtgcccgtcagcagcttcatcacccagtacagcaccgggcaggtcaccgtggagatggagtgggagctcaagaaggaaaactccaagaggtggaacccagagatccagtacacaaacaactacaacgacccccagtttgtggactttgccccggacagcaccggggaatacagaaccgccagacctatcggaacccgataccttacccgacccctttaa

SEQ ID NO: 803 - DNA, 2175 bp, Artificial Sequence
  source: /note="Description of Artificial Sequence: Synthetic polynucleotide"
atgtcttttgttgatcaccctccagattggttggaagaagttggtgaaggtcttcgcgagtttttgggccctgaagcgggcccaccgaaaccaaaacccaatcagcagcatcaagatcaagcccgtggtcttgtgctgcctggttataactatctcggacccggaaacggtctcgatcgaggagagcctgtcaacagggcagacgaggtcgcgcgagagcacgacatctcgtacaacgagcagcttgaggcgggagacaacccctacctcaagtacaaccacgcggacgccgagtttcaggagaagctcgccgacgacacatccttcgggggaaacctcggaaaggcagtctttcaggccaagaaaagggttctcgaaccttttggcctggttgaagagggtgctaagacggcccctaccggaaagcggatagacgaccactttccaaaaagaaagaaggcccggaccgaagaggactccaagccttccacctcgtcagacgccgaagctggacccagcggatcccagcagctgcaaatcccagcccaaccagcctcaagtttgggagctgatacaatgtctgcgggaggtggcggcccattgggcgacaataaccaaggtgccgatggagtgggcaatgcctcgggagattggcattgcgattccacgtggatgggggacagagtcgtcaccaagtccacccgaacctgggtgctgcccagctacaacaaccaccagtaccgagagatcaaaagcggctccgtcgacggaagcaacgccaacgcctactttggatacagcaccccctgggggtactttgactttaaccgcttccacagccactggagcccccgagactggcaaagactcatcaacaactactggggcttcagaccccggtccctcagagtcaaaatcttcaacattcaagtcaaagaggtcacggtgcaggactccaccaccaccatcgccaacaacctcacctccaccgtccaagtgtttacggacgacgactaccagctgccctacgtcgtcggcaacgggaccgagggatgcctgccggccttccctccgcaggtctttacgctgccgcagtacggttacgcgacgctgaaccgcgacaacacagaaaatcccaccgagaggagcagcttcttctgcctagagtactttcccagcaagatgctgagaacgggcaacaactttgagtttacctacaactttgaggaggtgcccttccactccagcttcgctcccagtcagaacctcttcaagctggccaacccgctggtggaccagtacttgtaccgcttcgtgagcacaaataacactggcggagtccagttcaacaagaacctggccgggagatacgccaacacctacaaaaactggttcccggggcccatgggccgaacccagggctggaacctgggctccggggtcaaccgcgccagtgtcagcgccttcgccacgaccaataggatggagctcgagggcgcgagttaccaggtgcccccgcagccgaacggcatgaccaacaacctccagggcagcaacacctatgccctggagaacactatgatcttcaacagccagccggcgaacccgggcaccaccgccacgtacctcgagggcaacatgctcatcaccagcgagagcgagacgcagccggtgaaccgcgtggcgtacaacgtcggcgggcagatgaccaccaacaaccagagctccaccactgcccccgcgaccggcacgtacaacctccaggaaatcgtgcccggcagcgtgtggatggagagggacgtgtacccccaaggacccatctgggccaagatcccagagacgggggcgcactttcacccctctccggccatgggcggattcggactcaaacacccaccgcccatgatgctcatcaagaacacgcctgtgcccggaaatatcaccagcttctcggacgtgcccgtcagcagcttcatcacccagtacagcaccgggcaggtcaccgtggagatggagtgggagctcaagaaggaaaactccaagaggtggaacccagagatccagtacacaaacaactacaacgacccccagtttgtggactttgccccggacagcaccggggaatacaggaccaccagacctatcggaacccgataccttacccgacccctttaa

SEQ ID NO: 804 - DNA, 2175 bp, Artificial Sequence
  source: /note="Description of Artificial Sequence: Synthetic polynucleotide"
atgtcttttgttgatcaccctccagattggttggaagaagttggtgaaggtcttcgcgagtttttgggccttgaagcgggcccaccgaaaccaaaacccaatcagcagcatcaagatcaagcccgtggtcttgtgctgcctggttataactatctcggacccggaaacggtctcgatcgaggagagcctgtcaacagggcagacgaggtcgcgcgagagcacgacatctcgtacaacgagcagcttgaggcgggagacaacccctacctcaagtacaaccacgcggacgccgagtttcaggagaagctcgccgacgacacatccttcgggggaaacctcggaaaggcagtctttcaggccaagaaaagggttctcgaaccttttggcctggttgaagagggtgctaagacggcccctaccggaaagcggatagacgaccactttccaaaaagaaagaaggcccggaccgaagaggactccaagccttccacctcgtcagacgccgaagctggacccagcggatcccagcagctgcaaatcccagcccaaccagcctcaagtttgggagctgatacaatgtctgcgggaggtggcggcccattgggcgacaataaccaaggtgccgatggagtgggcaatgcctcgggagattggcattgcgattccacgtggatgggggacagagtcgtcaccaagtccacccgaacctgggtgctgcccagctacaacaaccaccagtaccgagagatcaaaagcggctccgtcgacggaagcaacgccaacgcctactttggatacagcaccccctgggggtactttgactttaaccgcttccacagccactggagcccccgagactggcaaagactcatcaacaactactggggcttcagaccccggtccctcagagtcaaaatcttcaacattcaagtcaaagaggtcacggtgcaggactccaccaccaccatcgccaacaacctcacctccaccgtccaagtgtttacggacgacgactaccagctgccctacgtcgtcggcaacgggaccgagggatgcctgccggccttccctccgcaggtctttacgctgccgcagtacggttacgcgacgctgaaccgcgacaacacagaaaatcccaccgagaggagcagcttcctctgcctagagtactttcccagcaagatgctgagaacgggcaacaactttgagtttacctacaactttgaggaggtgcccttccactccagcttcgctcccagtcagaacctcttcaagctggccaacccgctggtggaccagtacttgtaccgcttcgtgagcacaaataacactggcggagtccagttcaacaagaacctggccgggagatacgccaacacctacaaaaactggttcccggggcccatgggccgaacccagggctggaacctgggctccggggtcaaccgcgccagtgtcagcgccttcgccacgaccaataggatggagctcgagggcgcgagttaccaggtgcccccgcagccgaacggcatgaccaacaacctccagggcagcaacacctatgccctggagaacactatgatcttcaacagccagccggcgaacccgggcaccaccgccacgtacctcgagggcaacatgctcatcaccagcgagagcgagacgcagccggtgaaccgcgtggcgtacaacgtcggcgggcagatggccaccaacaaccagagctccaccactgcccccgcgaccggcacgtacaacctccaggaaatcgtgcccggcagcgtgtggatgaagagggacgtgtacctccaaggacccatctgggccaagatcccagagacgggggcgcactttcacccctctccggccatgggcggattcggactcaaacacccaccgcccatgatgctcatcaagaacacgcctgtgcccggaaatatcaccagcttctcggacgtgcccgtcagcagcttcatcacccagtacagcaccgggcaggtcaccgtggagatggagtgggagctcaagaaggaaaactccaagaggtggaacccagagatccagtacacaaacaactacaacgacccccagtttgtggactttgccccggacagcaccggggaatacagaaccaccagacctatcggaacccgataccttacccgacccctttaa

SEQ ID NO: 805 - DNA, 2175 bp, Artificial Sequence
  source: /note="Description of Artificial Sequence: Synthetic polynucleotide"
atgtcttttgttgatcaccctccagattggttggaagaagttggtgaaggtcttcgcgagtttttgggccttgaggcgggcccaccgaaaccaaaacccaatcagcagcatcaagatcaagcccgtggtcttgtgctgcctggttataactatctcggacccggaaacggtctcgatcgaggagagcctgtcaacagggcagacgaggtcgcgcgagagcacgacatctcgtacaacgagcagcttgaggcgggagacaacccctacctcaagtacaaccacgcggacgccgagtttcaggagaagctcgccgacgacacatccttcgggggaaacctcggaaaggcagtctttcaggccaagaaaagggttctcgaaccttttggcctggttgaagagggtgctaagacggcccctaccggaaagcggatagacgaccactttccaaaaagaaagaaggcccggaccgaagaggactccaagccttccaccccgtcagacgccgaagctggacccagcggatcccagcagctgcaaatcccagcccaaccagcctcaagtttgggagctgatacaatgtctgcgggaggtggcggcccattgggcgacaataaccaaggtgccgatggagtgggcaatgcctcgggagattggcattgcgattccacgtggatgggggacagagtcgtcaccaagtccacccgaacctgggtgctgcccagctacaacaaccaccagtaccgagagatcaaaagcggctccgtcgacggaagcaacgccaacgcctactttggatacagcaccccctgggggtactttgactttaaccgcttccacagccactggagcccccgagactggcaaagactcatcaacaactactggggcttcagaccccggtccctcagagtcaaaatcttcaacattcaagtcaaagaggtcacggtgcaggactccaccaccaccatcgccaacaacctcacctccaccgtccaagtgtttacggacgacgactaccagctgccctacgtcgtcggcaacgggaccgagggatgcctgccggccttccctccgcaggtctttacgctgccgcagtacggttacgcgacgctgaaccgcgacaacacagaaaatcccaccgagaggagcagcttcttctgcctagagtactttcccagcaagatgctgagaacgggcaacaactttgagtttacctacaactttgaggaggtgcccttccactccagcttcgctcccagtcagaacctcttcaagctggccaacccgctggtggaccagtacttgtaccgcttcgtgagcacaaataacactggcggagtccagttcaacaagaacctggccgggagatacgccaacacctacaaaaactggttcccggggcccatgggccgaacccagggctggaacctgggctccggggtcaaccgcgccagtgtcagcgccttcgccacgaccaataggatggagctcgagggcgcgagttaccaggtgcccccgcagccgaacggcatgaccaacaacctccagggcagcaacacctatgccctggagaacactatgatcttcaacagccagccggcgaacccgggcaccaccgccacgtacctcgagggcaacatgctcatcaccagcgagagcgagacgcagccggtgaaccgcgtggcgtacaacgtcggcgggcagatggccaccaacaaccagagctccaccactgcccccgcgaccggcacgtacaacctccaggaaatcgtgcccggcagcgtgtggatggagagggacgtgtacctccaaggacccatctgggccaagatcccagagacgggggcgcactttcacccctctccggccatgggcggattcggactcaaacacccaccgcccatgatgctcatcaagaacacgcctgtgcccggaaatatcaccagcttctcggacgtgcccgtcagcagcttcatcacccagtacagcaccgggcaggtcaccgtggagatggagtgggagctcaagaaggaaaactccaagaggtggaacccagagatccagtacacaaacaactacaacgacccccagtttgtggactttgccccggacagcaccggggaatacagaaccaccagacctatcggaacccgataccttacccgacccctttaa

SEQ ID NO: 806 - DNA, 2175 bp, Artificial Sequence
  source: /note="Description of Artificial Sequence: Synthetic polynucleotide"
atgtcttttgttgatcaccctccagattggttggaagaagttggtgaaggtcttcgcgagtttttgggccttgaagcgggcccaccgaaaccaaaacccaatcagcagcatcaagatcaagcccgtggtcttgtgctgcctggttataactatctcggacccggaaacggtctcgatcgaggagagcctgtcaacagggcagacgaggtcgcgcgagagcacgacatctcgtacaacgagcagcttgaggcgggagacaacccctacctcaagtacaaccacgcggacgccgagtttcaggagaagctcgccgacgacacatccttcgggggaaacctcggaaaggcagtctttcaggccaagaaaagggttctcgaaccttttggcctggttgaagagggtgctaagacggcccctaccggaaagcggatagacgaccactttccaaaaagaaagaaggcccggaccgaagaggactccaagccttccacctcgtcagacgccgaagctggacccagcggatcccagcagctgcaaatcccagcccaaccagcctcaagtttgggagctgatacaatgtctgcgggaggtggcggcccattgggcgacaataaccaaggtgccgatggagtgggcaatgcctcgggagattggcattgcgattccacgtggatgggggacagagtcgtcaccaagtccacccgaacctgggtgctgcccagctacaacaaccaccagtaccgagagatcaaaagcggctccgtcgacggaagcaacgccaacgcctactttggatacagcaccccctgggggtactttgactttaaccgcttccacagccactggagcccccgagactggcaaagactcatcaacaactactggggcttcagaccccggtccctcagagtcaaaatcttcaacattcaagtcaaagaggtcacggtgcaggactccaccaccaccatcgccaacaacctcacctccaccgtccaagtgtttacggacgacgactaccagctgccctacgtcgtcggcaacgggaccgagggatgcctgccggccttccctccgcaggtctttacgctgccgcagtacggttacgcgacgctgaaccgcgacaacacagaaaatcccaccgagaggagcagcttcttctgcctagagtactttcccagcaagatgctgagaacgggcaacaactttgagtttacctacaactttgaggaggtgcccttccactccagcttcgctcccagtcagaacctcttcaagctggccaacccgctggtggaccagtacttgtaccgcttcgtgagcacaaataacactggcggagtccagttcaacaagaacctggccgggagatacgccaacacccacaaaaactggttcccggggcccatgggccgaacccagggctggaacctgggctccggggtcaaccgcgccagtgtcagcgccttcgccacgaccaataggatggagctcgagggcgcgagttaccaggtgcccccgcagtcgaacggcatgaccaacaacctccggggcagcaacacctatgccctggagaacactatgatcttcaacagccagccggcgaacccgggcaccaccgccacgtacctcgagggcaacatgctcatcaccagcgagagcgagacgcagccggtgaaccgcgtggcgtacaacgtcggcgggcagatggccaccaacaaccagagctccaccactgcccccgcgaccggcacgtacaacctccaggaaatcgtgcccggcagcgtgtggatggagagggacgtgtacctccaaggacccatctgggccaagatcccagagacgggggcgcactttcacccctctccggccatgggcggattcggactcaaacacccaccgcccatgatgctcatcaagaacacgcctgtgcccggaaatatcaccagcttctcggacgtgcccgtcagcagcttcatcacccagtacagcaccgggcaggtcaccgtggagatggagtgggagctcaagaaggaaaactccaagaggtggaacccagagatccagtacacaaacaactacaacgacccccagtttgtggactttgccccggacagcaccggggaatacagaaccaccagacctatcggaacccgataccttacccgacccctttaa

SEQ ID NO: 807 - DNA, 2175 bp, Artificial Sequence
  source: /note="Description of Artificial Sequence: Synthetic polynucleotide"
atgtcttttgttgatcaccctccagattggttggaagaagttggtgaaggtcttcgcgagtttttgggccttgaagcgggcccaccgaaaccaaaacccaatcagcagcatcaagatcaagcccgtggtcttgtgctgcctggttataactatctcggacccggaaacggtctcgatcgaggagagcctgtcaacagggcagacgaggtcgcgcgagagcacgacatctcgtacaacgagcagcttgaggcgggagacaacccctacctcaagtacaaccacgcggacgccgagtttcaggagaagctcgccgacgacacatccttcgggggaaacctcggaaaggcagtctttcaggccaagaaaagggttctcgaaccttttggcctggttgaagagggtgctaagacggcccctaccggaaagcggatagacgaccactttccaaaaagaaagaaggcccggaccgaagaggactccaagccttccacctcgtcagacgccgaagctggacccagcggatcccagcagctgcaaatcccagcccaaccagcctcaagtttgggagctgatacaatgtctgcgggaggtggcggcccattgggcgacaataaccaaggtgccgatggagtgggcaatgcctcgggagattggcattgcgattccacgtggatgggggacagagtcgtcaccaagtccacccgaacctgggtgctgcccagctacaacaaccaccagtaccgagagatcaaaagcggctccgtcgacggaagcaacgccaacgcctactttggatacagcaccccctgggggtactttgactttaaccgcttccacagccactggagcccccgagactggcaaagactcatcaacaactactggggcttcagaccccggtccctcagagtcaaaatcttcaacattcaagtcaaagaggtcacggtgcaggactccaccaccaccatcgccaacaacctcacctccaccgtccaagtgtttacggacgacgactaccagctgccctacgtcgtcggcaacgggaccgagggatgcctgccggccttccctccgcaggtctttacgctgccgcagtacggttacgcgacgctgaaccgcgacaacacagaaaatcccaccgagaggagcagcttcttctgcctagagtactttcccagcaagatgctgagaacgggcaacaactttgagtttacctacaactttgaggaggtgcccttccactccagcttcgctcccagtcagaacctcttcaagctggccaacccgctggtggaccagtacttgtaccgcttcgtgagcacaaataacactggcggagtccagttcaacaagaacctggccgggagatacgccaacacctacaaaaactggttcccggggcccatgggccgaacccagggctggaacctgggctccggggtcaaccgcgccagtgtcagcgccttcgccacgaccaataggatggagctcgagggcgcgagttaccaggtgcccccgcagccgaacggcatgaccaacaacctccagggcagcaacacctatgccctggagaacactatgatcttcaacagccagccggcgaacccgggcaccaccgccacgtacctcgagggcaacatgctcatcaccagcgagagcgagacgcagccggtgaaccgcgtggcgtacagcgtcggcgggcagatggccaccaacaaccagagctccaccactgcccccacgaccggcacgtacaacctccaggaaatcgtgcccggcagcgtgtggatggagagggacgtgtacctccaaggacccatctgggccaagatcccagagacgggggcgcactttcacccctctccggccatgggcggattcagactcaaacacccaccgcccatgatgctcatcaagaacacgcctgtgcccggaaatatcaccagcttctcggacgtgcccgtcagcagcttcatcacccagtacagcaccgggcaggtcaccgtggagatggagtgggagctcaagaaggaaaactccaagaggtggaacccagagatccagtacacaaacaactacaacgacccccagtttgtggactttgccccggacagcaccggggaatacagaaccaccagacctatcggaacccgataccttacccgacccctttaa

SEQ ID NO: 808 - DNA, 2175 bp, Artificial Sequence
  source: /note="Description of Artificial Sequence: Synthetic polynucleotide"
atgtcttttgttgatcaccctccagattggttggaagaagttggtgaaggtcttcgcgagtttttgggccttgaagcgggcccaccgaaaccaaaacccaatcagcagcatcaagatcaagcccgtggtcttgtgctgcctggttataactatctcggacccggaaacggtctcgatcgaggagagcctgtcaacagggcagacgaggtcgcgcgagagcacgacatctcgtacaacgagcagcttgaggcgggagacaacccctacctcaagtacaaccacgcggacgccgagtttcaggagaagctcgccgacgacacatccttcgggggaaacctcggaaaggcagtctttcaggccaagaaaagggttctcgaaccttttggcctggttgaagagggtgctaagacggcccctaccggaaagcggatagacgaccactttccaaaaagaaagaaggcccggaccgaagaggactccaagccttccacctcgtcagacgccgaagctggacccagcggatcccagcagctgcaaatcccagcccaaccagcctcaagtttgggagctgatacaatgtctgcgggaggtggcggcccattgggcgacaataaccaaggtgccgatggagtgggcaatgcctcgggagattggcattgcgattccacgtggatgggggacagagtcgtcaccaagtccacccgaacctgggtgctgcccagctacaacaaccaccagtaccgagagatcaaaagcggctccgtcgacggaagcaacgccaacgcctactttggatacagcaccccctgggggtactttgactttaaccgcttccacagccactggagcccccgagactggcaaagactcatcaacaactactggggcttcagaccccggtccctcagagtcaaaatcttcaacattcaagtcaaagaggtcacggtgcaggactccaccaccaccatcgccaacaacctcacctccaccgtccaagtgtttacggacgacgactaccagctgccctacgtcgtcggcaacgggaccgagggatgcctgccggccttccctccgcaggtctttacgctgccgcagtacggttacgcgacgctgaaccgcgacaacacagaaaatcccaccgagaggagcagcttcttctgcctagagtactttcccagcaagatgctgagaacgggcaacaactttgagtttacctacaactttgaggaggtgcccttccactccagcttcgctcccagtcagaacctcttcaagctggccaacccgctggtggaccagtacttgtaccgcttcgtgagcacaaataacactggcggagtccagttcaacaagaacctggccgggagatacgccaacacctacaaaaactggttcccggggcccatgggccgaacccagggctggaacctgggctccggggtcaaccgcgccagtgtcagcgccttcgccgcgaccaataggatggagctcgagggcgcgagttaccaggtgcccccgcagccgaacggcatgaccaacaacctccagggcagcaacacctatgccctggagaacactatgatcttcaacagccagccggcgaacccgggcaccaccgccacgtacctcgagggcaacatgctcatcaccagcgagagcgagacgcagccggtgaaccgcgtggcgtacaacgtcggcgggcagatggccaccaacaaccagagctccaccactgcccccgcgaccggcacgtacaacctccaggaaatcgtgcccggcggcgtgtggatggagagggacgtgtacctccaaggacccatctgggccaagatcccagagacgggggcgcactttcacccctctccggccatgggcggattcggactcaaacacccaccgcccatgatgctcatcaagaacacgcctgtgcccggaaataccaccagcttctcggacgtgcccgtcagcagcttcatcacccagtacagcaccgggcaggtcaccgtggagatggagtgggagctcaagaaggaaaactccaagaggtggaacccagagatccagtacacaaacaactacaacgacccccagtttgtggactttgccccggacagcaccggggaatacagaaccaccagacctatcggaacccgataccttacccgacccctttaa

SEQ ID NO: 809 - DNA, 2175 bp, Artificial Sequence
  source: /note="Description of Artificial Sequence: Synthetic polynucleotide"
atgtcttttgttgatcaccctccagattggttggaagaagttggtgaaggtcttcgcgagtttttgggccttgaagcgggcccaccgaaaccaaaacccaatcagcagcatcaagatcaagcccgtggtcttgtgctgcctggttataactatctcggacccggaaacggtctcgatcgaggagagcctgtcaacagggcagacgaggtcgcgcgagagcacgacatctcgtacaacgagcagcttgaggcgggagacaacccctacctcaagtacaaccacgcggacgccgagtttcaggagaagctcgccgacgacacatccttcgggggaaacctcggaaaggtagtctttcaggccaagaaaagggttctcgaaccttttggcctggttgaagagggtgctaagacggcccctaccggaaagcggatagacgaccactttccaaaaagaaagaaggcccggaccgaagaggactccaagccttccacctcgtcagacgccgaagctggacccagcggatcccagcagctgcaaatcccagcccaaccagcctcaagtttgggagctgatacaatgtctgcgggaggtggcggcccattgggcggcaataaccaaggtgccgatggagtgggcaatgcctcgggagattggcattgcgattccacgtggatgggggacagagtcgtcaccaagtccacccgaacctgggtgctgcccagctacaacaaccaccagtaccgagagatcaaaagcggctccgtcgacggaagcaacgccaacgcctactttggatacagcaccccctgggggtactttgactttaaccgcttccacagccactggggcccccgagactggcaaagactcatcaacaactactggggcttcagaccccggtccctcagagtcaaaatcttcaacattcaagtcaaagaggtcacggtgcaggactccaccaccaccatcgccaacaacctcacctccaccgtccaagtgtttacggacgacgactaccagctgccctacgtcgtcggcaacgggaccgagggatgcctgccggccttccctccgcaggtctttacgctgccgcagtacggttacgcgacgctgaaccgcgacaacacagaaaatcccaccgagaggagcagcttcttctgcctagagtactttcccagcaagatgctgagaacgggcaacaactttgagtttacctacaactttgaggaggtgcccttccactccagcttcgctcccagtcagaacctcttcaagctggccaacccgctggtggaccagtacttgtaccgcttcgtgagcacaaataacactggcggagtccagttcaacaagaacctggccgggagatacgccaacacctacaaaaactggttcccggggcccatgggccgaacccagggctggaacctgggctccggggtcaaccgcgccagtgtcagcgccctcgccacgaccaataggatggagctcgagggcgcgagttaccaggtgcccccgcagccgaacggcatgaccaacaacctccagggcagcaacacctatgccctggagaacactatgatcttcaacagccagccggcgaacccgggcaccaccgccacgtacctcgagggcaacatgctcatcaccagcgagagcgagacgcagccggtgaaccgcgtggcgtacaacgtcggcgggcagatggccaccaacaaccagagctccaccactgcccccgcgaccggcacgtacaacctccaggaaatcgtgcccggcagcgtgtggatggagagggacgtgtacctccaaggacccatctgggccaagatcccagagacgggggcgcactttcacccctctccggccatgggcggattcggactcaaacacccaccgcccatgatgctcatcaagaacacgcctgtgcccggaaatatcaccagcttctcggacgtgcccgtcagcagcttcatcacccagtacagcaccgggcaggtcaccgtggagatggagtgggagctcaagaaggaaaactccaagaggtggaacccagagatccagtacacaaacaactacaacgacccccagtttgtggactttgccccggacagcaccggggaatacagaaccaccagacctatcggaacccgataccttacccgacccctttaa

SEQ ID NO: 810 - DNA, 2175 bp, Artificial Sequence
  source: /note="Description of Artificial Sequence: Synthetic polynucleotide"
atgtcttttgttgatcaccctccagattggttggaagaagttggtgaaggtcttcgcgagtttttgggccttgaagcgggcccaccgaaaccaaaacccaatcagcagcatcaagatcaagcccgtggtcttgtgctgcctggttataactatctcggacccggaaacggtctcgatcgaggagagcctgtcaacagggcagacgaggtcgcgcgagagcacgacatctcgtacaacgagcagcttgaggcgggagacaacccctacctcaagtacaaccacgcggacgccgagtttcaggagaagctcgccgacgacacatccttcgggggaaacctcggaaaggcagtctttcaggccaagaaaagggttctcgaaccttttggcctggttgaagagggtgctaagacggcccctaccggaaagcggatagacgaccactttccaaaaagaaagaaggcccggaccgaagaggactccaagccttccacctcgtcagacgccgaagctggacccagcggatcccagcagctgcaaatcccagcccaaccagcctcaagtttgggagctgatacaatgtctgcgggaggtggcggcccattgggcgacaataaccaaggtgccgatggagtgggcaatgcctcgggagattggcattgcgattccacgtggatgggggacagagtcgtcaccaagtccacccgaacctgggtgctgcccagctacaacaaccaccagtaccgagagatcaaaagcggctccgtcgacggaagcaacgccaacgcctactttggatacagcaccccctgggggtactttgactttaaccgcttccacagccactggagcccccgagactggcaaagactcatcaacaactactggggcttcagaccccggtccctcagagtcaaaatcttcaacattcaagtcaaagaggtcacggtgcaggactccaccaccaccatcgccaacaacctcacctccaccgtccaagtgtttacggacgacgactaccagctgccctacgtcgtcggcaacgggaccgagggatgcctgccggccttccctccgcaggtctttacgctgccgcagtacggttacgcgacgctgaaccgcgacaacacagaaaatcccaccgagaggagcagcttcttctgcctagagtactttcccagcaagatgctgagaacgggcaacaactttgagtttacctacaactttgaggaggtgcccttccactccagcttcgctcccagtcagaacctcttcaagctggccaacccgctggtggaccagtacttgtaccgcttcgtgagcacaaataacactggcggagtccagttcaacaagaacctggccgggagatacgccaacacctacaaaaactggttcccggggcccatgggccgaacccagggctggaacctgggctccggggtcaaccgcgccagtgtcagcgccttcgccacgaccaataggatggagctcgagggcgcgagttaccaggtgcccccgcagccgaacggcatgaccaacaacctccagggcagcaacacctatgccctggagaacactatgatcttcaacagccagccggcgaacccgggcaccaccgccacgtacctcgagggcaacatgctcatcaccagcgagagcgagacgcagccggtgaaccgcgtggcgtacaacgtcggcgggcagatggccaccaacaaccagagctccaccactgcccccgcgaccggcacgtacaacctccaggaaatcgtgcccggcagcgtgtggatggagagggacgtgtacctccaaggacccatctgagccaagatcccagagacgggggcgcactttcacccctctccggccatgggcggattcggactcaaacacccaccgcccatgatgctcatcaagaacacgcctgtgcccggaaatatcaccagcttctcggacgtgcccgtcagcagcttcatcacccagtacagcaccgggcaggtcaccgtggagatggagtgggagctcaagaaggaaaactccaagaggtggaacccagagatccagtacacaaacaactacaacgacccccagtttgtggactttgccccggacagcaccggggaatgcagaaccaccagacctatcggaacccgataccttacccgacccctttaa

SEQ ID NO: 811 - DNA, 2175 bp, Artificial Sequence
  source: /note="Description of Artificial Sequence: Synthetic polynucleotide"
atgtcttttgttgatcaccctccagattggttggaagaagttggtgaaggtcttcgcgagtttttgggccttgaagcgggcccaccgaaaccaaaacccaatcagcagcatcaagatcaagcccgtggtcttgtgctgcctggttataactatctcggacccggaaacggtctcgatcgaggagagcctgtcaacagggcagacgaggtcgcgcgagagcacgacatctcgtacaacgagcagcttgaggcgggagacaacccctacctcaagtacaaccacgcggacgccgagtttcaggagaagctcgccgacgacacatccttcgggggaaacctcggaaaggcagtctttcaggccaagaaaagggttctcgaaccttttggcctggttgaagagggtgctaagacggcccctaccggaaagcggatagacgaccactttccaaaaagaaagaaggcccggaccgaagaggactccaagccttccacctcgtcagacgccgaagctggacccagcggatcccagcagctgcaaatcccagcccaaccagcctcaagtttgggagctgatacaatgtctgcgggaggtggcggcccattgggcgacaataaccaaggtgccgatggagtgggcaatgcctcgggagattggcattgcgattccacgtggatgggggacagagtcgtcaccaagtccacccgaacctgggtgctgcccagctacaacaaccaccagtaccgagagatcaaaagcggctccgtcgacggaagcaacgccaacgcctactttggatacagcaccccctgggggtactttgactttaaccgcttccacagccactggagcccccgagactggcaaagactcatcaacaactactggggcttcagaccccggtccctcagagtcaaaatcctcaacattcaagtcaaagaggtcacggtgcaggactccaccaccaccatcgccaacaacctcacctccaccgtccaagtgtttacggacgacgactaccagctgccctacgtcgtcggcaacgggaccgagggatgcctgccggccttccctccgcaggtctttacgctgccgcagtacggttacgcgacgctgaaccgcgacaacacagaaaatcccaccgagaggagcagcttcttctgcctagagtactttcccagcaagatgctgagaacgggcaacaactttgagtttacctacaactttgaggaggtgcccttccactccagcttcgctcccagtcagaacctcttcaagctggccaacccgctggtgggccagtacttgtaccgcttcgtgagcacaaataacactggcggagtccagttcaacgagaacctggccgggagatacgccaacacctacaaaaactggttcccggggcccatgggccgaacccagggctggaacctgggctccggggtcaaccgcgccagtgtcagcgccttcgccacgaccaataggatggagctcgagggcgcgagttaccaggtgcccccgcagccgaacggcatgaccaacaacctccagggcagcaacacctatgccctggagaacactatgatcttcaacagccagccggcgaacccgggcaccaccgccacgtacctcgagggcaacatgctcatcaccagcgagagcgagacgcagccggtgaaccgcgtggcgtacaacgtcggcgggcagatggccaccaacaaccagagctccaccactgcccccgcgaccggcacgtacaacctccaggaaatcgtgcccggcagcgtgtggatggagagggacgtgtacctccaaggacccatctgggccaagatcccagagacgggggcgcactttcacccctctccggccatgggcggattcggactcaaacacccaccgcccatgatgctcatcaagaacacgcctgtgcccggaaatatcaccagcttctcggacgtgcccgtcagcagcttcatcacccagtacagcaccgggcaggccaccgtggagatggagtgggagctcaagaaggaaaactccaagaggtggaacccagagatccagtacacaaacaactacaacgacccccagtttgtggactttgccccggacagcaccggggaatacagaaccaccagacctatcggaacccgataccttacccgacccctttaa

SEQ ID NO: 812 - DNA, 2175 bp, Artificial Sequence
  source: /note="Description of Artificial Sequence: Synthetic polynucleotide"
atgtcttttgttgatcaccctccagattggttggaagaagttggtgaaggtcttcgcgagtttttgggccttgaagcgggcccaccgaaaccaaaacccaatcagcagcatcaagatcaagcccgtggtcttgtgctgcctggttataactatctcggacccggaaacggcctcgatcgaggagagcctgtcaacagggcagacgaggtcgcgcgagagcacgacatctcgtacaacgagcagcttgaggcgggagacaacccctacctcaagtacaaccacgcggacgccgagtttcaggagaagctcgccgacgacacatccttcgggggaaacctcggaaaggcagtctttcaggccaagaaaagggttctcgaaccttttggcctggttgaagagggtgctaagacggcccctaccggaaagcggatagacgaccactttccaaaaagaaagaaggcccggaccgaagaggactccaagccttccacctcgtcagacgccgaagctggacccagcggatcccagcagctgcaaatcccagcccaaccagcctcaagtttgggagctgatacaatgtctgcgggaggtggcggcccattgggcgacaataaccaaggtgccgatggagtgggcaatgcctcgggagattggcattgcgattccacgtggatgggggacagagtcgtcaccaagtccacccgaacctgggtgctgcccagctacaacaaccaccagtaccgagagatcaaaagcggctccgtcgacggaagcaacgccaacgcctactttggatacagcaccccctgggggtactttgactttaaccgcttccacagccactggagcccccgagactggcaaagactcatcaacaactactggggcttcagaccccggtccctcagagtcaaaatcttcaacattcaagtcaaagaggtcacggtgcaggactccaccaccatcatcgccaacaacctcacctccaccgtccaagtgtttacggacgacgactaccagctgccctacgtcgtcggcaacgggaccgagggatgcctgccggccttccctccgcaggtctttacgctgccgcagtacggttacgcgacgctgaaccgcgacaacacagaaaatcccaccgagaggagcagcttcttctgcctagagtactttcccagcaagatgctgagaacgggcaacaactttgagtttacctacaactttgaggaggtgcccttccactccagcttcgcccccagtcagaacctcttcaagctggccaacccgctggtggaccagtacttgtaccgcttcgtgagcacaaataacactggcggagtccagttcaacaagaacctggccgggagatacgccaacacctacaaaaactggttcccggggcccatgggccgaacccagggctggaacctgggctccggggtcaaccgcgccagtgtcagcgccttcgccacgaccaataggatggagctcgagggcgcgagttaccaggtgcccccgcagccgaacggcatgaccaacaacctccagggcagcaacacctatgccctggagaacactatgatcttcaacagccagccggcgaacccgggcaccaccgccacgtacctcgagggcaacatgctcatcaccagcgagagcgagacgcagccggtgaaccgcgtggcgtacaacgtcggcgggcagatggccaccaacaaccagagctccaccactgcccccgcgaccggcacgtacaacctccaggaaatcgtgcccggcagcgtgtggatggagagggacgtgtacctccaaggacccatctgggccaagatcccagagacgggggcgcactttcacccctctccggccatgggcggattcggactcaaacacccaccgcccatgatgctcatcaagaacacgcctgtgcccggaaatatcaccagcttctcggacgtgcccgtcagcagcttcatcacccagtacagcaccgggcaggtcaccgtggagatggagtgggagctcaagaaggaaaactccaagaggtggaacccagagatccagtacacaaacaactacaacgacccccagtttgtggactttgccccggacagcaccggggaatacagaaccaccagacctatcggaacccgataccttacccgacccctttaa

SEQ ID NO: 813 - DNA, 2175 bp, Artificial Sequence
  source: /note="Description of Artificial Sequence: Synthetic polynucleotide"
atgtcttttgttgatcaccctccagattggttggaagaagttggtgaaggtcttcgcgagtttttgggccttgaagcgggcccaccgaaaccaaaacccaatcagcagcatcaagatcaagcccgtggtcttgtgctgcctggttataactatctcggacccggaaacggtctcgatcgaggagagcctgtcaacagggcagacgaggtcgcgcgagagcacgacatctcgtacaacgagcagcttgaggcgggagacaacccctacctcaagtacaaccacgcggacgccgagtttcaggagaagctcgccgacgacacatccttcgggggaaacctcggaaaggcagtctttcaggccaagaaaagggttctcgaaccttttggcctggttgaagagggtgctaagacggcccctaccggaaagcggatagacgaccactttccaaaaagaaagaaggcccggaccgaagaggactccaagccttccacctcgtcagacgccgaagctggacccagcggatcccagcagctgcaaatcccagcccaaccagcctcaagtttgggagctgatacaatgtctgcgggaggtggcggcccattgggcgacaataaccaaggtgccgatggagtgggcaatgcctcgggagattggcattgcgattccacgtggatgggggacagagtcgtcaccaagtccacccgaacctgggtgctgcccagctacaacaaccaccagtaccgagagatcaaaagcggctccgtcgacggaagcaacgccaacgcctactttggatacagcaccccctgggggtactttgactttaaccgcttccacagccactggagcccccgagactggcaaagactcatcaacaactactggggcttcagaccccggtccctcagagtcaaaatcttcaacattcaagtcaaagaggtcacggtgcaggactccaccaccaccatcgccaacaacctcacctccaccgtccaagtgtttacggacgacgactaccagctgccctacgtcgtcggcaacgggaccgagggatgcctgccggccttccctccgcaggtctttacgctgccgcagtacggttacgcgacgctgaaccgcgacaacacagaaaatcccaccgagaggagcagcttcttctgcctagagtactttcccagcaagatgctgagaacgggcaacaactttgagtttacctacaactttgaggaggtgcccttccactccagcttcgctcccagtcagaacctcttcaagctggccaacccgctggtggaccagtacttgtaccgcttcgtgagcacaaataacactggcggagtccagttcaacaagaacctggccgggagatacgccaacacctacaaaaactggttcccggggcccatgggccgaacccagggctggaacctgggctccggggtcaaccgcgccagtgtcagcgccttcgccacgaccaataggatggagctcgagggcgcgagttaccaggtgcccccgcagccgaacggcatgaccaacaacctccagggcagcaacacctatgccctggagaacactatgatcttcaacagccagccggcgaacccgggcaccaccgccacgtacctcgagggcaacatgctcatcaccagcgagagcgagacgcagccggtgaaccgcgtggcgtacaacgtcggcgggcagatggccaccaacaaccagagctccaccactgcccccgcgaccggcacgtacaacctccaggaaatcgtgcccggcagcgtgtggatggagagggacgtgtacctccaaggacccatctgggccaagatcccagagacgggggcgcactttcacccctctccggccatgggcggattcggactcaaacacccaccgcccatgatgctcatcaagaacacgcctgtgcccggaaatatcaccagcctctcggacgtgcccgtcagcagcttcatcacccagtacagcaccgggcaggtcaccgtggagatggagtgggagctcaagaaggaaaactccaagaggtggaacccagagatccagtacacaaacaactacaacgacccccagtttgtggactttgccccggacagcaccggggaatacagaaccaccagacctatcggaacccgataccttacccgacccctttaa

SEQ ID NO: 814 - DNA, 2175 bp, Artificial Sequence
  source: /note="Description of Artificial Sequence: Synthetic polynucleotide"
atgtcttttgttgatcaccctccagattggttggaagaagttggtgaaggtcttcgcgagtttttgggccttgaagcgggcccaccgaaaccaaaacccaatcagcagcatcaagatcaagcccgtggtcttgtgctgcctggttataactatctcggacccggaaacggtctcgatcgaggagagcctgccaacagggcagacgaggtcgcgcgagagcacgacatctcgtacaacgagcagcttgaggcgggagacaacccctacctcaagtacaaccacgcgggcgccgagtttcaggagaagctcgccgacgacacatccttcgggggaaacctcggaaaggcagtctttcaggccaagaaaagggttctcgaaccttttggcctggttgaagagggtgctaagacggcccctaccggaaagcggatagacgaccactttccaaaaagaaagaaggcccggaccgaagaggactccaagccttccacctcgtcagacgccgaagctggacccagcggatcccagcagctgcaaatcccagcccaaccagcctcaagtttgggagctgatacaatgtctgcgggaggtggcggcccattgggcgacaataaccaaggtgccgatggagtgggcaatgcctcgggagattggcattgcgattccacgtggatgggggacagagtcgtcaccaagtccacccgaacctgggtgctgcccggctacaacaaccaccagtaccgagagatcaaaagcggctccgtcgacggaagcaacgccaacgcctactttggatacagcaccccctgggggtactttgactttaaccgcttccacagccactggagcccccgagactggcaaagactcatcaacaactactggggcttcagaccccggtccctcagagtcaaaatcttcaacattcaagtcaaagaggtcacggtgcaggactccaccaccaccatcgccaacaacctcacctccaccgtccaagtgtttacggacgacgactaccagctgccctacgtcgtcggcaacgggaccgagggatgcctgccggccttccctccgcaggtctttacgctgccgcagtacggttacgcgacgctgaaccgcgacaacacagaaaatcccaccgagaggagcagcttcttctgcctagagtactttcccagcaagatgctgagaacgggcaacaactttgagtttacctacaactttgaggaggtgcccttccactccagcttcgctcccagtcagaacctcttcaagctggccaacccgctggtggaccagtacttgtaccgcttcgtgagcacaaataatactggcggagtccagttcaacaagaacctggccgggagatacgccaacacctacaaaaactggttcccggggcccatgggccgaacccagggctggaacctgggctccggggtcaaccgcgccagtgtcagcgccttcgccacgaccaataggatggagctcgagggcgcgagttaccaggtgcccccgcagccgaacggcatgaccaacaacctccagggcagcaacacctatgccctggagaacactatgatcttcaacagccagccggcgaacccgggcaccaccgccacgtacctcgagggcaacatgctcatcaccagcgagagcgagacgcagccggtgaaccgcgtggcgtacaacgtcggcgggcagatggccaccaacaaccagagctccaccactgcccccgcgaccggcacgtacaacctccaggaaatcgtgcccggcagcgtgtggatggagagggacgtgtacctccaaggacccatctgggccaagatcccagagacgggggcgcactttcacccctctccggccatgggcggattcggactcaaacacccaccgcccatgatgctcatcaagaacacgcctgtgcccggaaatatcaccagcttctcggacgtgcccgtcagcagcttcatcacccagtacagcaccgggcaggtcaccgtggagatggagtgggagctcaagaaggaaaactccaagaggtggaacccagagatccagtacacaaacaactacaacgacccccagtttgtggactttgccccggacagcaccggggaatacagaaccaccagacctatcggaacccgataccttacccgacccctttaa

SEQ ID NO: 815 - DNA, 2175 bp, Artificial Sequence
  source: /note="Description of Artificial Sequence: Synthetic polynucleotide"
atgtcttttgttgatcaccctccagattggttggaagaagttggtgaaggtcttcgcgagtttttgggccttgaagcgggcccaccgaaaccaaaacccaatcagcagcatcaagatcaagcccgtggtcttgtgctgcctggttataactatctcggacccggaaacggtctcgatcgaggagagcctgtcaacagggcagacgaggtcgcgcgagagcacgacatctcgtacaacgagcagcttgaggcgggagacaacccctacctcaagtacaaccacgcggacgccgagtttcaggagaagctcgccgacgacacatccttcgggggaaacctcggaaaggcagtctttcaggccaagaaaagggttctcgaaccttttggcctggttgaagagggtgctaagacggcccctaccggaaagcggatagacgaccactttccaaaaagaaagaaggcccggaccgaagaggactccaagcctcccacctcgtcagacgccgaagctggacccagcggatcccagcagctgcaaatcccagcccaaccagcctcaagtttgggagctgatacaatgtctgcgggaggtggcggcccattgggcgacaataaccaaggtgccgatggagtgggcaatgcctcgggagattggcattgcgattccacgtggatgggggacagagtcgtcaccaagtccacccgaacctgggtgctgcccagctacaacaaccaccagtaccgagagatcaaaagcggctccgtcgacggaagcaacgccaacgcctactttggatacagcaccccctgggggtactttgactttaaccgcttccacagccactggagcccccgagactggcaaagactcatcaacaactactggggcttcagaccccggtccctcagagtcaaaatcttcaacattcaagtcaaagaggtcacggtgcaggactccgccaccaccatcgccaacaacctcacctccaccgtccaagtgtttacggacgacgactaccagctgccctacgtcgtcggcaacgggaccgagggatgcctgccggccttccctccgcaggtctttacgctgccgcagtacggttacgcgacgctgaaccgcgacaacacagaaaatcccaccgagaggagcagcttcttctgcctagagtactttcccagcaagatgctgagaacgggcaacaactttgagtttacctacaactttgaggaggtgcccttccactccagcttcgctcccagtcagaacctcttcaagctggccaacccgctggtggaccagtacttgtaccgcttcgtgagcacaaataacactggcggagtccagttcaacaagaacctggccgggagatacgccaacacctacaaaaactggttcccggggcccatgggccgaacccagggctggaacctgggctccggggtcaaccgcgccagtgtcagcgccttcgccacgaccaataggatggagctcgagggcgcgagttaccaggtgcccccgcagccgaacggcatgaccaacaacctccagggcagcaacacctatgccctggagaacactatgatcttcaacagccagccggcgaacccgggcaccaccgccacgtacctcgagggcaacatgctcatcaccagcgagagcgagacgcagccggtgaaccgcgtggcgtacaacgtcggcgggcagatggccaccaacaaccagagctccaccactgcccccgcgaccggcacgtacaacctccaggaaatcgtgcccggcagcgtgtggatggagagggacgtgtacctccaaggacccatctgggccaagatcccagagacgggggcgcactttcacccctctccggccatgggcggattcggactcaaacacccaccgcccatgatgctcatcaagaacacgcctgtgcccggaaatatcaccagcttctcggacgtgcccgtcagcagcttcatcacccagtacagcaccgggcaggtcaccgtggagatggagtgggagctcaagaaggaaaactccaagaggtggaacccagagatccagtacacaaacaactacaacgacccccagtttgtggactttgccccggacagcaccggggaatacagaaccaccagacctatcggaacccgataccttacccgacccctttaa

SEQ ID NO: 816 - DNA, 2175 bp, Artificial Sequence
  source: /note="Description of Artificial Sequence: Synthetic polynucleotide"
atgtcttttgttgatcaccctccagattggttggaagaagttggtgaaggtcttcgcgagtttttgggccttgaagcgggcccaccgaaaccaaaacccaatcagcagcatcaagatcaagcccgtggtcttgtgctgcctggttataactatctcggacccggaaacggtctcgatcgaggagagcctgtcaacagggcagacgaggtcgcgcgagagcacgacatctcgtacaacgagcagcttgaggcgggagacaacccctacctcaagtacaaccacgcggacgccgagtttcaggagaagctcgccgacgacacatccttcgggggaaacctcggaaaggcagtctttcaggccaagaaaagggttctcgaaccttttggcctggttgaagagggtgctaagacggcccctaccggaaagcggatagacgaccactttccaaaaagaaagaaggcccggaccgaagaggactccaagccttccacctcgtcagacgccgaagctggacccagcggatcccagcagccgcaaatcccagcccaaccagcctcaagtttgggagctgatacaatgtctgcgggaggtggcggcccattgggcgacaataaccaaggtgccgatggagtgggcaatgcctcgggagattggcattgcgattccacgtggatgggggacagagtcgtcaccaagtccacccgaacctgggtgctgcccagctacaacaaccaccagtaccgagagatcaaaagcggctccgtcgacggaagcaacgccaacgcctactttggatacagcaccccctgggggtactttgactttaaccgcttccacagccactggagcccccgagactggcaaagactcatcaacaactactggggcttcagaccccggtccctcagagtcaaaatcttcaacattcaagtcaaagaggtcacggtgcaggactccaccaccaccatcgccaacaacctcacctccaccgtccaagtgtttacggacgacgactaccagctgccctacgtcgtcggcaacgggaccgagggatgcctgccggccttccctccgcaggtctttacgctgccgcagtacggttacgcgacgctgaaccgcgacaacacagaaaatcccaccgagaggagcagcttcttctgcctagagtactttcccagcaagatgctgagaacgggcaacaactttgagtttacctacaactttgaggaggtgcccttccactccagcttcgctcccagtcagaacctcttcaagctggccaacccgctggtggaccagtacttgtaccgcttcgtgagcacaaataacactggcggagtccagttcaacaagaacctggccgggagatacgccaacacctacaaaaactggttcccggggcccatgggccgaacccagggctggaacctgggctccggggtcaaccgcgccagtgtcagcgccttcgccacgaccaataggatggagctcgagggcgcgagttaccaggtgcccccgcagccgaacggcatgaccaacaacctccagggcagcaacacctatgccctggagaacactatgatcttcaacagccagccggcgaacccgggcaccaccgccacgtacctcgagggcaacatgctcatcaccagcgagagcgagacgcagccggtgaaccgcgtggcgtacaacgtcggcgggcagatggccaccaacaaccagagctccaccactgcccccgcgaccggcacgtacaacctccaggaaatcgtgcccggcagcgtgtggatggagagggacgtgtacctccaaggacccatctgggccaagatcccagagacgggggcgcactttcacccctctccggccatgggcggattcggactcaaacacccaccgcccatgatgctcatcaagaacacgcctgcgcccggaaatatcaccagcttctcggacgtgcccgtcagcagcttcatcacccagtacagcaccgggcaggtcaccgtggagatggagtgggagctcaagaaggaaaactccaagaggtggaacccagagatccagtacacaaacaactacaacgacccccagtttgtggactttgccccggacagcaccggggaatacagaaccaccagacctatcggaacccgataccttacccgacccctttaa

SEQ ID NO: 817 - DNA, 2175 bp, Artificial Sequence
  source: /note="Description of Artificial Sequence: Synthetic polynucleotide"
atgtcttttgttgatcaccctccagattggttggaagaagttggtgaaggtcttcgcgagtttttgggccttgaagcgggcccaccgaaaccaaaacccaatcagcagcatcaagatcaagcccgtggtcttgtgctgcctggttataactatctcggacccggaaacggtctcgatcgaggagagcctgtcaacagggcagacgaggtcgcgcgagagcacgacatctcgtacaacgagcagcttgaggcgggagacaacccctacctcaagtacaaccacgcggacgccgagtttcaggagaagctcgccgacgacacatccttcgggggaaacctcggaaaggcagtctttcaggccaagaaaagggttctcgaaccttttggcctggttgaagagggtgctaagacggcccctaccggaaagcggatagacgaccactttccaaaaagaaagaaggcccggaccgaagaggactccaagcctcccacctcgtcagacgccgaagctggacccagcggatcccagcagctgcaaatcccagcccaaccagcctcaagtttgggagctgatacaatgtctgcgggaggtggcggcccattgggcgacaataaccaaggtgccgatggagtgggcaatgcctcgggagattggcattgcgattccacgtggatgggggacagagtcgtcaccaagtccacccgaacctgggtgctgcccagctacaacaaccaccagtaccgagagatcaaaagcggctccgtcgacggaagcaacgccaacgcctactttggatacagcaccccctgggggtactttgactttaaccgcttccacagccactggagcccccgagactggcaaagactcatcaacaactactggggcttcagaccccggtccctcagagtcaaaatcttcaacattcaagtcaaagaggtcacggtgcaggactccaccaccaccatcgccaacaacctcacctccaccgtccaagtgtttacggacgacgactaccagctgccctacgtcgtcggcaacgggaccgagggatgcctgccggccttccctccgcaggtctttacgctgccgcagtacggttacgcgacgctgaaccgcgacaacacagaaaatcccaccgagaggagcagcttcttctgcctagagtactttcccagcaagatgctgagaacgggcaacaactttgagtttacctacaactttgaggaggtgcccttccactccagcttcgctcccagtcagaacctcttcaagctggccaacccgctggtggaccagtacttgtaccgcttcgtgagcacaaataacactggcggagtccagttcaacaagaacctggccgggagatacgccaacacctacaaaaactggttcccggggcccatgggccgaacccagggctggaacctgggctccggggtcaaccgcgccagtgtcagcgccttcgccacgaccaataggatggagctcgagggcgcgagttaccaggtgcccccgcagccgaacggcatgaccaacaacctccagggcagcaacacctatgccctggagaacactatgatcttcaacagccagccggcgaacccgggcaccaccgccacgtacctcgagggcaacatgctcatcaccagcgagagcgagacgcagccggtgaaccgcgtggcgtacaacgtcggcgggcagatggccaccaacaaccagagctccaccactgcccccgcgaccggcacgtacaacctccaggaaatcgtgcccggcagcgtgtggatggagagggacgtgtacctccaaggacccatctgggccaagatcccagagacgggggcgcactttcacccctctccggccatgggcggattcggactcaaacacccaccgcccatgatgctcatcaagaacacgcctgtgcccggaaatatcaccagcttctcggacgtgcccgtcagcagcttcatcacccagtacagcaccgggcaggtcaccgtggagatggagtgggagctcaagaaggaaaactccaagaggtggaacccagagatccagtacacaaacaactacaacgacccccagtttgtggactttgccccggacagcaccggggaatacagaaccaccagacctatcggaacccgataccttacccgacccctttaa

SEQ ID NO: 818 - DNA, 2175 bp, Artificial Sequence
  source: /note="Description of Artificial Sequence: Synthetic polynucleotide"
atgtcttttgttgatcaccctccagattggttggaagaagttggtgaaggtcttcgcgagtttttgggccttgaagcgggcccaccgaaaccaaaacccaatcagcagcatcaagatcaagcccgtggtcttgtgctgcctggttataactatctcggacccggaaacggtctcgatcgaggagagcctgtcaacagggcagacgaggtcgcgcgagagcacgacatctcgtacaacgagcagcttgaggcgggagacaacccctacctcaagtacaaccacgcggacgccgagtttcaggagaagctcgccgacgacacatccttcgggggaaacctcggaaaggcagtctttcaggccaagaaaagggttctcgaaccttttggcctggttgaagagggtgctaagacggcccctaccggaaagcggatagacgaccactttccaaaaagaaagaaggcccggaccgaagaggactccaagcctcccacctcgtcagacgccgaagctggacccagcggatcccagcagctgcaaatcccagcccaaccagcctcaagtttgggagctgatacaatgtctgcgggaggtggcggcccattgggcgacaataaccaaggtgccgatggagtgggcaatgcctcgggagattggcattgcgattccacgtggatgggggacagagtcgtcaccaagtccacccgaacctgggtgccgcccagctacaacaaccaccagtaccgagagatcaaaagcggctccgtcgacggaagcaacgccaacgcctactttggatacagcaccccctgggggtactttgactttaaccgcttccacagccactggagcccccgagactggcaaagactcatcaacaactactggggcttcagaccccggtccctcagagtcaaaatcttcaacattcaagtcaaagaggtcacggtgcaggactccaccaccaccatcgccaacaacctcacctccaccgtccaagtgtttacggacgacgactaccagctgccctacgtcgtcggcaacgggaccgagggatgcctgccggccttccctccgcaggtctttacgctgccgcagtacggttacgcgacgctgaaccgcgacaacacagaaaatcccaccgagaggagcagcttcttctgcctagagtactttcccagcaagatgctgagaacgggcaacaactttgagtttacctacaactttgaggaggtgcccttccactccagcttcgctcccagtcagaacctcttcaagctggccaacccgctggtggaccagtacttgtaccgcttcgtgagcacaaataacactggcggagtccagttcaacaagaacctggccgggagatacgccaacacctacaaaaactggttcccggggcccatgggccgaacccagggctggaacctgggctccggggtcaaccgcgccagtgtcagcgccttcgccacgaccaataggatggagctcgagggcgcgagttaccaggtgcccccgcagccgaacggcatgaccaacaacctccagggcagcaacacctatgccctggagaacactatgatcttcaacagccagccggcgaacccgggcaccaccgccacgtacctcgagggcaacatgctcatcaccagcgagagcgagacgcagccggtgaaccgcgtggcgtacaacgtcggcgggcagatggccaccaacaaccagagctccaccactgcccccgcgaccggcacgtacaacctccaggaaatcgtgcccggcagcgtgtggatggagagggacgtgtacctccaaggacccatctgggccaagatcccagagacgggggcgcactttcacccctctccggccatgggcggattcggactcaaacacccaccgcccatgatgctcatcaagaacacgcctgtgcccggaaatatcaccagcttctcggacgtgcccgtcagcagcttcatcacccagtacagcaccgggcaggtcgccgtggagatggagtgggagctcaagaaggaaaactccaagaggtggaacccagagatccagtacacaaacaactacaacgacccccagtttgtggactttgccccggacagcaccggggaatacagaaccaccagacctatcggaacccgataccttacccgacccctttaa

SEQ ID NO: 819 - DNA, 2175 bp, Artificial Sequence
  source: /note="Description of Artificial Sequence: Synthetic polynucleotide"
atgtcttttgttgatcaccctccagattggttggaagaagttggtgaaggtcttcgcgagtttttgggccttgaagcgggcccaccgaaaccaaaacccaatcagcagcatcaagatcaagcccgtggtcttgtgctgcctggttataactatctcggacccggaaacggtctcgatcgaggagagcctgtcaacagggcagacgaggtcgcgcgagagcacgacatctcgtacaacgagcagcttgaggcgggagacaacccctacctcaagtacaaccacgcggacgccgagtttcaggagaagctcgccgacgacacatccttcgggggaaacctcggaaaggcagtctttcaggccaagaaaagggttctcgaaccttttggcctggttgaagagggtgctaagacggcccctaccggaaagcggatagacgaccactttccaaaaagaaagaaggcccggaccgaagaggactccaagccttccacctcgtcagacgccgaagctggacccagcggatcccagcagctgcaaatcccagcccaaccagcctcaagtttgggagctgatacaatgtctgcgggaggtggcggcccattgggcgacaataaccaaggtgccgatggagtgggcaatgcctcgggagattggcattgcgattccacgtggatgggggacagagtcgtcaccaagtccacccgaacctgggtgctgcccagctacaacaaccaccagtaccgagagatcaaaagcggctccgtcgacggaagcaacgccaacgcctactttggatacagcaccccctgggggtactttgactttaaccgcttccacagccactggagcccccgagactggcaaagactcatcaacaactactggggcttcagaccccggtccctcagagtcaaaatcttcaacattcaagtcaaagaggtcacggtgcaggactccaccaccaccatcgccaacaacctcacctccaccgtccaagtgtttacggacgacgactaccagctgccctacgtcgtcggcaacgggaccgagggatgcctgccggccttccctccgcaggtctttacgctgccgcagtacggttacgcgacgctgaaccgcgacaacacagaaaatcccaccgagaggagcagcttcttctgcctagagtactttcccagcaagatgctgagaacgggcaacaactttgagtttacctacaactttgaggaggtgcccttccactccagcttcgctcccagtcagaacctcttcaagctggccaacccgctggtggaccagtacttgtaccgcttcgtgagcacaaataacactggcggagtccagttcaacaagaacctggccgggagatacgccaacacctacaaaaactggttcccggggcccatgggccgaacccagggctggaacctgggctccggggtcaaccgcgccagtgtcagcgccttcgccacgaccaataggatggagctcgagggcgcgagttaccaggtgcccccgcagccgaacggcatgaccaacaacctccagggcagcaacacctatgccctggagaacactatgatcttcaacagccagccggcgaacccgggcaccaccgccacgtacctcgagggcaacatgctcatcaccagcgagagcgagacgcagccggtgaaccgcgtggcgtacaacgtcggcgggcagatggccaccaacaaccagagctccaccactgcccccgcgaccggcacgtacaacctccaggaaatcgtgcccggcagcgtgtggatggagagggacgtgtacctccaaggacccatctgggccaagatcccagagacgggggcgcactttcacccctctccggccatgggcggattcggactcaaacacccaccgcccatgatgctcatcaagaacacgcctgcgcccggaaatatcaccagcttctcggacgtgcccgtcagcagcttcatcacccagtacagcaccgggcaggtcaccgtggagatggagtgggagctcaagaaggaaaactccaagaggtggaacccagagatccagtacacaaacaactacaacgacccccagtttgtggactttgccccggacagcaccggggaatacagaaccaccagacctatcggaacccgataccttacccgacccctttaa

SEQ ID NO: 820 - DNA, 2175 bp, Artificial Sequence
  source: /note="Description of Artificial Sequence: Synthetic polynucleotide"
atgtcttttgttgatcaccctccagattggttggaagaagttggtgaaggtcttcgcgagtttttgggccttgaagcgggcccaccgaaaccaaaacccaatcagcagcatcaagatcaagcccgtggtcttgtgctgcctggttataactatctcggacccggaaacggtctcgatcgaggagagcctgtcaacagggcagacgaggtcgcgcgagagcacgacatctcgtacaacgagcagcttgaggcgggagacaacccctacctcaagtacaaccacgcggacgccgagtttcaggagaagctcgccgacgacacatccttcgggggaaacctcggaaaggcagtctttcaggccaagaaaagggttctcgaaccttttggcctggctgaagagggtgctaagacggcccctaccggaaagcggatagacgaccactttccaaaaagaaagaaggcccggaccgaagaggactccaagccttccacctcgtcagacgccgaagctggacccagcggatcccagcagctgcaaatcccagcccaaccagcctcaagtttgggagctgatacaatgtctgcgggaggtggcggcccattgggcgacaataaccaaggtgccgatggagtgggcaatgcctcgggagattggcattgcgattccacgtggatgggggacagagtcgtcaccaagtccacccgaacctgggtgctgcccagctacaacaaccaccagtaccgagagatcaaaagcggctccgtcgacggaagcaacgccaacgcctactttggatacagcaccccctgggggtactttgactttaaccgcttccacagccactggagcccccgagactggcaaagactcatcaacaactactggggcttcagaccccggtccctcagagccaaaatcttcaacattcaagtcaaagaggtcacggtgcaggactccaccaccaccatcgccaacaacctcacctccaccgtccaagtgtttacggacgacgactaccagctgccctacgtcgtcggcaacgggaccgagggatgcctgccggccttccctccgcaggtctttacgctgccgcagtacggttacgcgacgctgaaccgcgacaacacagaaaatcccaccgagaggagcagcttcttctgcctagagtactttcccagcaagatgctgagaacgggcaacaaccttgagtttacctacaactttgaggaggtgcccttccactccagcttcgctcccagtcagaacctcttcaagctggccaacccgctggtggaccagtacttgtaccgcttcgtgagcacaaataacactggcggagtccagttcaacaagaacctggccgggagatacgccaacacctacaaaaactggttcccggggcccatgggccgaacccagggctggaacctgggctccggggtcaaccgcgccagtgtcagcgccttcgccacgaccaataggatggagctcgagggcgcgagttaccaggtgcccccgcagccgaacggcatgaccaacaacctccagggcagcaacacctatgccctggagaacactatgatcttcaacagccagccggcgaacccgggcaccaccgccacgtacctcgagggcaacatgctcatcaccagcgagagcgagacgcagccggtgaaccgcgtggtgcacaacgtcggcgggcagatggccaccaacaaccagagctccaccactgcccccgcgaccggcacgtacaacctccaggaaatcgtgcccggcagcgtgtggatggagagggacgtgtacctccaaggacccatctgggccaagatcccagagacgggggcgcactttcacccctctccggccatgggcggattcggactcaaacacccaccgcccatgatgctcatcaagaacacgcctgtgcccggaaatatcaccagcttctcggacgtgcccgtcagcagcttcatcacccagtacagcaccgggcaggtcaccgtggagatggagtgggagctcaagaaggaaaactccaagaggtggaacccggagatccagtacacaaacaactacaacgacccccagtttgtggactttgccccggacagcaccggggaatacagaaccaccagacctatcggaacccgataccttacccgacccctttaa

SEQ ID NO: 821 - DNA, 2175 bp, Artificial Sequence
  source: /note="Description of Artificial Sequence: Synthetic polynucleotide"
atgtcttttgttgatcaccctccagattggttggaagaagttggtgaaggtcttcgcgagtttttgggccttgaagcgggcccaccgaaaccaaaacccaatcagcagcatcaagatcaagcccgtggtcttgtgctgcctggttataactatctcggacccggaaacggtctcgatcgaggagagcctgtcaacagggcagacgaggtcgcgcgagagcacgacatctcgtacaacgagcagcttgaggcgggagacaacccctacctcaagtacaaccacgcggacgccgagtttcaggagaagctcgccgacgacacatccttcgggggaaacctcggaaaggcagtctttcaggccaagaaaagggttctcgaaccttttggcctggttgaagagggtgctaagacggcccctaccggaaagcggatagacgaccactttccaaaaagaaagaaggcccggaccgaagaggactccaagccttccacctcgtcagacgccgaagctggacccagcggatcccagcagctgcaaatcccagcccaaccagcctcaagtttgggagctgatacaatgtctgcgggaggtggcggcccattgggcgacaataaccaaggtgccgatggagtgggcaatgcctcgggagattggcattgcgattccacgtggatgggggacagagtcgtcaccaagtccacccgaacctgggtgctgcccagctacaacaaccaccagtaccgagagatcaaaagcggctccgtcgacggaggcaacgccaacgcctactttggatacagcaccccctgggggtactttgactttaaccgcttccacagccactggagcccccgggactggcaaagactcatcaacaactactggggcttcagaccccggtccctcagagtcaaaatcttcaacattcaagtcaaagaggtcacggtgcaggactccaccaccaccatcgccaacaacctcacctccaccgtccaagtgtttacggacgacgactaccagctgccctacgtcgtcggcaacgggaccgagggatgcctgccggccttccctccgcaggtctttacgctgccgcagtacggttacgcgacgctgaaccgcgacaacacagaaaatcccaccgagaggagcagcttcttctgcctagagtactttcccagcaagatgctgagaacgggcaacaactttgagtttacctacaactttgaggaggtgcccttccactccagcttcgctcccagtcagaacctcttcaagctggccaacccgctggtggaccagtacttgtaccgcttcgtgagcacaaataacactggcggagtccagttcaacaagaacctggccgggagatacgccaacacctacaaaaactggttcccggggcccatgggccgaacccagggctggaacctgggctccggggtcaaccgcgccagtgtcagcgccttcgccacgaccaataggatggagctcgagggcgcgagttaccaggtgcccccgcagccgaacggcatgaccaacaacctccagggcagcaacacctatgccctggagaacactatgatcttcaacagccagccggcgaacccgggcaccaccgccacgtacctcgagggcaacatgctcatcaccagcgagagcgagacgcagccggtgaaccgcgtggcgtacaacgtcggcgggcagatggccaccaacaaccagagctccaccactgcccccgcgaccggcacgtacaacctccaggaaatcgtgcccggcagcgtgtggatggagagggacgtgtacctccaaggacccatctgggccaagatcccagagacgggggcgcactttcacccctctccggccatgggcggattcggactcaaacacccaccgcccatgatgctcatcaagaacacgcctgcgcccggaaatatcaccagcttctcggacgtgcccgtcagcagcttcatcacccagtacagcaccgggcaggtcaccgtggagatggagtgggagctcaagaagggaaactccaagaggtggaacccagagatccagtacacaaacaactacaacgacccccagtttgtggactttgccccggacagcaccggggaatacagaaccaccagacctatcggaacccgataccttacccgacccctttaa

SEQ ID NO: 822 - DNA, 2175 bp, Artificial Sequence
  source: /note="Description of Artificial Sequence: Synthetic polynucleotide"
atgtcttttgttgatcaccctccagattggttggaagaagttggtgaaggtcttcgcgagtttttgggccttgaagcgggcccaccgaaaccaaaacccaatcagcagcatcaagatcaagcccgtggtcttgtgctgcctggttataactatctcggacccggaaacggtctcgatcgaggagagcctgtcaacagggcagacgaggtcgcgcgagagcacgacatctcgtacaacgagcagcttgaggcgggagacaacccctacctcaagtacaaccacgcggacgccgagtttcaggagaagctcgccgacgacacgtccttcgggggaaacctcggaaaggcagtctttcaggccaagaaaagggttctcgaaccttttggcctggttgaagagggtgctaagacggcccctaccggaaagcggatagacgaccactttccaaaaagaaagaaggcccggaccgaagaggactccaagccttccacctcgtcagacgccgaagctggacccagcggatcccagcagctgcaaatcccagcccaaccagcctcaagtttgggagctgatacaatgtctgcgggaggtggcggcccattgggcgacaataaccaaggtgccgatggagtgggcaatgcctcgggagattggcattgcgattccacgtggatgggggacagagtcgtcaccaagtccacccgaacctgggtgctgcccagctacaacaaccaccagtaccgagagatcaaaagcggctccgtcgacggaagcaacgccaacgcctactttggatacagcaccccctgggggtactttgactttaaccgcttccacagccactggagcccccgagactggcaaagactcatcaacaactactggggcttcagaccccggtccctcagagtcaaaatcttcaacattcaagtcaaagaggtcacggtgcaggactccaccaccaccatcgccaacaacctcacctccaccgtccaagtgtttacggacgacgactaccagctgccctacgtcgtcggcaacgggaccgagggatgcctgccggccttccctccgcaggtctttacgctgccgcagtacggttacgcgacgctgaaccgcgacaacacagaaaatcccaccgagaggagcagcttcttctgcctagagtactttcccagcaagatgctgagaacgggcaacaactttgagtttacctacaactttgaggaggtgcccttccactccagcttcgctcccagtcagaacctcttcaagctggccaacccgctggtggaccagtacttgtaccgcttcgtgagcacaaataacactggcggagtccagttcaacaagaacctggccgggagatacgccaacacctacaaaaactggttcccggggcccatgggccgaacccagggctggaacctgggctccggggtcaaccgcgccagtgtcagcgccttcgccacgaccaataggatggagctcgagggcgcgagttaccaggtgcccccgcagccgaacggcatgaccaacaacctccagggcagcaacacctatgccctggagaacactatgatcttcaacagccagccggcgaacccgggcaccaccgccacgtacctcgagggcaacatgctcatcaccagcgagagcgagacgcagccggtgaaccgcgtggcgtacaacgtcggcgggcagatggccaccaacaaccagagctccaccactgcccccgcgaccggcacgtacaacctccaggaaatcgtgcccggcagcgtgtggatggagagggacgtgtacctccaaggacccatctgggccaagatcccagagacgggggtgcactttcacccctctccggccatgggcggattcggactcaaacacccaccgcccatgatgctcatcaagaacacgcctgtgcccggaaatatcaccagcttctcggacgtgcccgtcagcagcttcatcacccagtacagcaccgggcaggtcaccgtggagatggagtgggagctcaagaaggaaaactccaagaggtggaacccagagatccagtacacaaacaactacaacgacccccagtttgtggactttgccccggacagcaccggggaatacagaaccaccagacctatcggaacccgataccttacccgacccctttaa

SEQ ID NO: 823 - DNA, 2175 bp, Artificial Sequence
  source: /note="Description of Artificial Sequence: Synthetic polynucleotide"
  modified_base (1652)..(1652): a, c, g, or t
atgtcttttgttgatcaccctccagattggttggaagaagttggtgaaggtcttcgcgagtttttgggccttgaagcgggcccaccgaaaccaaaacccaatcagcagcatcaagatcaagcccgtggtcttgtgctgcctggttataactatctcggacccggaaacggtctcgatcgaggagagcctgtcaacagggcagacgaggtcgcgcgagagcacgacatctcgtacaacgagcagcttgaggcgggagacaacccctacctcaagtacaaccacgcggacgccgagtttcaggagaagctcgccgacgacacatccttcgggggaaacctcggaaaggcagtctttcaggccaagaaaagggttctcgaaccttttggcctggttgaagagggtgctaagacggcccctaccggaaagcggatagacgaccactttccaaaaagaaagaaggcccggaccgaggaggactccaagccttccacctcgtcagacgccgaagctggacccagcggatcccagcagctgcaaatcccagcccaaccagcctcaagtttgggagctgatacaatgtctgcgggaggtggcggcccattgggcgacaataaccaaggtgccgatggagtgggcaatgcctcgggagattggcattgcgattccacgtggatgggggacagagtcgtcaccaagtccacccgaacctgggtgctgcccagctacaacaaccaccagtaccgagagatcaaaagcggctccgtcgacggaagcaacgccaacgcctactttggatacagcaccccctgggggtactttgactttaaccgcttccacagccactggagcccccgagactggcaaagactcatcaacaactactggggcttcagaccccggtccctcagagtcaaaatcttcaacattcaagtcaaagaggtcacggtgcaggactccaccaccaccatcgccaacaacctcacctccaccgtccaagtgtttacggacgacgactaccagctgccctacgtcgtcggcaacgggaccgagggatgcctgccggccttccctccgcaggtctttacgctgccgcagtacggttacgcgacgctgaaccgcgacaacacagaaaatcccaccgagaggagcagcttcttctgcctagagtactttcccagcaagatgctgagaacgggcaacaactttgagtttacctacaactttgaggaggtgcccttccactccagcttcgctcccagtcagaacctcttcaagctggccaacccgctggtggaccagtacttgtaccgcttcgtgagcacaaataacactggcggagtccagttcaacaagaacctggccgggagatacgccaacacctacaaaaactggttcccggggcccatgggccgaacccagggctggaacctgggctccggggtcaaccgcgccagtgtcagcgccttcgccacgaccaataggatggagctcgagggcgcgagttaccaggtgcccccgcagccgaacggcatgaccaacaacctccagggcagcaacacctatgccctggagaacactatgatcttcaacagccagccggcgaacccgggcaccaccgccacgtacctcgagggcagcatgctcatcaccancgagagcgagacgcagccggtgaaccgcgtggcgtacaacgtcggcgggcagatggccaccaacaaccagagctccaccactgcccccgcgaccggcacgtacaacctccaggaaatcgtgcccggcagcgtgtggatggagagggacgtgtacctccaaggacccatctgggccaagatcccagagacgggggcgcactttcacccctctccggccatgggcggattcggactcaaacacccaccgcccatgatgctcatcaagaacacgcctgtgcccggaaatatcaccagcttctcggacgtgcccgtcagcagcttcatcacccagtacagcaccgggcaggtcaccgtggagatggagtgggagctcaagaaggaaaactccaagaggtggaacccagagatccagtacacaaacaactacaacgacccccagtttgtggactttgccccggacagcaccggggaatacagaaccaccagacctatcggaacccgataccttacccgacccctttaa

SEQ ID NO: 824 - DNA, 2211 bp, Artificial Sequence
  source: /note="Description of Artificial Sequence: Synthetic polynucleotide"
atggctgctgacggttatcttccagattggctcgaggacaacctttctgaaggcattcgtgagtggtgggctctgaaacctggagtccctcaacccaaagcgaaccaacaacaccaggacaaccgtcggggtcttgtgcttccgggttacaaatacctcggacccggtaacggactcgacaaaggagagccggtcaacgaggcggacgcggcagccctcgaacacgacaaagcttacgaccagcagctcaaggccggtgacaacccgtacctcaagtacaaccacgccgacgccgagtttcaggagcgtcttcaagaagatacgtcttttgggggcaaccttggcagagcagtcttccaggccaaaaagaggatccttgagcctcttggtctggttgaggaagcagctaaaacggctcctggaaagaagaggcctgtagatcagtctcctcaggaaccggactcatcatctggtgttggcaaatcgggcaaacagcctgccagaaaaagactaaatttcggtcagactggcgactcagagtcagtcccagaccctcaacctctcggagaaccaccagcagcccccacaagtttgggatctaatacaatggcttcaggcggtggcgcaccaatggcagacaataacgagggtgccgatggagtgggtaattcctcaggaaattggcattgcgattcccaatggctgggcgacagagtcatcaccaccagcaccagaacctgggccctgcccacttacaacaaccatctctacaagcaaatctccagccaatcaggagcttcaaacgacaaccactactttggctacagcaccccttgggggtattttgactttaacagattccactgccacttctcaccacgtgactggcagcgactcattaacaacaactggggattccggcccaagaaactcagcttcaagctcttcaacatccaagttaaagaggtcacgcagaacgatggcacgacgactattgccaataaccttaccagcacggttcaagtgtttacggactcggagtatcagctcccgtacgtgctcgggtcggcgcaccaaggctgtctcccgccgtttccagcggacgtcttcatggtccctcagtatggatacctcaccctgaacaacggaagtcaagcggtgggacgctcatccttttactgcctggagtacttcccttcgcagatgctaaggactggaaataacttccaattcagctataccttcgaggatgtaccttttcacagcagctacgctcacagccagagtttggatcgcttgatgaatcctcttattgatcagtatctgtactacctgaacagaacgcaaggaacaacctctggaacaaccaaccaatcacggctgctttttagccaggctgggcctcagtctatgtctttgcaggccagaaattggctacctgggccctgctaccggcaacagagactttcaaagactgctaacgacaacaacaacagtaactttccttggacagcggccagcaaatatcatctcaatggccgcgactcgctggtgaatccaggaccagctatggccagtcacaaggacgatgaagaaaaatttttccctatgcacggcaatctaatatttggcaaagaagggacaacggcaagtaacgcagaattagataatgtaatgattacggatgaagaagagattcgtaccaccaatcctgtggcaacagagcagtatggaactgtggcaaataacttgcagagctcaaatacagctcccacgactagaactgtcaatgatcagggggccttacctggcatggtgtggcaagatcgtgacgtgtaccttcaaggacctatctgggcaaagattcctcacacggatggacactttcatccttctcctctgatgggaggctttggactgaaacatccgcctcctcaaatcatgatcaaaaatactccggtaccggcaaatcctccgacgactttcagcccggccaagtttgcttcatttatcactcagtactccactggacaggtcagcgtggaaattgagtgggagctacagaaagaaaacagcaaacgttggaatccagagattcagtacacttccaactacaacaagtctgttaatgtggactttactgtagacactaatggtgtttatagtgaacctcgccctattggaacccggtatctcacacgaaacttgtaa

SEQ ID NO: 825 - DNA, 2205 bp, Artificial Sequence; identical to SEQ ID NO: 93
  source: /note="Description of Artificial Sequence: Synthetic polynucleotide"

SEQ ID NO: 826 - DNA, 2234 bp, Artificial Sequence
  source: /note="Description of Artificial Sequence: Synthetic polynucleotide"
atgtcttttgttgatcaccctccagattggttggaagaagttggtgaaggtcttcgcgagtttttgggccttgaagcgggcccaccgaaaccaaaacccaatcagcagcatcaagatcaagcccgtggtcttgtgctgcctggttataactatctcggacccggaaacggtctcgatcgaggagagcctgtcaacagggcagacgaggtcgcgcgagagcacgacatctcgtacaacgagcagcttgaggcgggagacaacccctacctcaagtacaaccacgcggacgccgagtttcaggagaagctcgccgacgacacatccttcgggggaaacctcggaaaggcagtctttcaggccaagaaaagggttctcgaaccttttggcctggttgaagagggtgctaagacggcccctaccggaaagcggatagacgaccactttccaaaaagaaagaaggctcggaccgaagaggactccaagccttccacctcgtcagacgccgaagctggacccagcggatcccagcagctgcaaatcccagcccaaccagcctcaagtttgggagctgatacaatgtctgcgggaggtggcggcccattgggcgacaataaccaaggtgccgatggagtgggcaatgcctcgggagattggcattgcgattccacgtggatgggggacagagtcgtcaccaagtccacccgaacctgggtgctgcccagctacaacaaccaccagtaccgagagatcaaaagcggctccgtcgacggaagcaacgccaacgcctactttggatacagcaccccctgggggtactttgactttaaccgcttccacagccactggagcccccgagactggcaaagactcatcaacaactactggggcttcagaccccggtccctcagagtcaaaatcttcaacattcaagtcaaagaggtcacggtgcaggactccaccaccaccatcgccaacaacctcacctccaccgtccaagtgtttacggacgacgactaccagctgccctacgtcgtcggcaacgggaccgagggatgcctgccggccttccctccgcaggtctttacgctgccgcagtacggttacgcgacgctgaaccgcgacaacacagaaaatcccaccgagaggagcagcttcttctgcctagagtactttcccagcaagatgctgagaacgggcaacaactttgagtttacctacaactttgaggaggtgcccttccactccagcttcgctcccagtcagaacctgttcaagctggccaacccgctggtggaccagtacttgtaccgcttcgtgagcacaaataacactggcggagtccagttcaacaagaacctggccgggagatacgccaacacctacaaaaactggttcccggggcccatgggccgaacccagggctggaacctgggctccggggtcaaccgcgccagtgtcagcgccttcgccacgaccaataggatggagctcgagggcgcgagttaccaggtgcccccgcagccgaacggcatgaccaacaacctccagggcagcaacacctatgccctggagaacactatgatcttcaacagccagccggcgaacccgggcaccaccgccacgtacctcgagggcaacatgctcatcaccagcgagagcgagacgcagccggtgaaccgcgtggcgtacaacgtcggcgggcagatggccaccaacaaccagagctccaccactgcccccgcgaccggcacgtacaacctccaggaaatcgtgcccggcagcgtgtggatggagagggacgtgtacctccaaggacccatctgggccaagatcccagagacgggggcgcactttcacccctctccggccatgggcggattcggactcaaacacccaccgcccatgatgctcatcaagaacacgcctgtgcccggaaatatcaccagcttctcggacgtgcccgtcagcagcttcatcacccagtacagcaccgggcaggtcaccgtggagatggagtgggagctcaagaaggaaaactccaagaggtggaacccagagatccagtacacaaacaactacaacgacccccagtttgtggactttgccccggacagcaccggggaatacagaaccaccagacctatcggaacccgataccttacccgacccctttaacccattcatgtcgcataccctcaataaaccgtgtattcgtgtcagtaaaatactgcctc

SEQ ID NO: 827 - protein, 736 aa, Artificial Sequence
  source: /note="Description of Artificial Sequence: Synthetic polypeptide"
MAADGYLPDWLEDNLSEGIREWWALKPGVPQPKANQQHQDNRRGLVLPGYKYLGPGNGLDKGEPVNEADAAALEHDKAYDQQLKAGDNPYLKYNHADAEFQERLQEDTSFGGNLGRAVFQAKKRILEPLGLVEEAAKTAPGKKRPVDQSPQEPDSSSGVGKSGKQPARKRLNFGQTGDSESVPDPQPLGEPPAAPTSLGSNTMASGGGAPMADNNEGADGVGNSSGNWHCDSQWLGDRVITTSTRTWALPTYNNHLYKQISSQSGASNDNHYFGYSTPWGYFDFNRFHCHFSPRDWQRLINNNWGFRPKKLSFKLFNIQVKEVTQNDGTTTIANNLTSTVQVFTDSEYQLPYVLGSAHQGCLPPFPADVFMVPQYGYLTLNNGSQAVGRSSFYCPEYFPSQMLRTGNNFQFSYTFEDVPFHSSYAHSQSLDRLMNPLIDQYLYYLNRTQGTTSGTTNQSRLLFSQAGPQSMSLQARNWLPGPCYRQQRLSKTANDNNNSNFPWTAASKYHLNGRDSLVNPGPAMASHKDDEEKFFPMHGNLIFGKEGTTASNAELDNVMITDEEEIRTTNPVATEQYGTVANNLQSSNTAPTTRTVNDQGALPGMVWQDRDVYLQGPIWAKIPHTDGHFHPSPLMGGFGLKHPPPQIMIKNTPVPANPPTTFSPAKFASFITQYSTGQVSVEIEWELQKENSKRWNPEIQYTSNYNKSVNVDFTVDTNGVYSEPHPIGTRYLTRNL

SEQ ID NO: 828 - protein, 736 aa, Artificial Sequence
  source: /note="Description of Artificial Sequence: Synthetic polypeptide"
MAADGYLPDWLEDNLSEGIREWWALKPGVPQPKANQQHQDNRRGLVLPGYKYLGPGNGLDKGEPVNEADAAALEHDKAYDQQLKAGDNPYLKYNHADAEFQERLQEDTSFGGNLGRAVFQAKKRILEPLGLVEEAAKTAPGKKRPVDQSPQEPDSSSGVGKSGKQPARKRLNFGQTGDSESVPDPQPLGEPPAAPTSLGSNTMASGGGAPMADNNEGADGVGNSSGNWHCDSQWLGDRVITTSTRTWALPTYNNHLYKQISSQSGASNDNHYFGYSTPWGYFDFNRFHCHFSPRDWQRLINNNWGFRPKKLSFKLFNIQVKEVTQNDGTTTVANNLTSTVQVFTDSEYQLPYVLGSAHQGCLPPFPADVFMVPQYGYLTLNNGSQAVGRSSFYCLEYFPSQMLRTGNNFQFSYTFEDVPFHSSYAHSQSLDRLMNPLIDQYLYYLNRTQGTTSGTTNQSRLLFSQAGPQSMSLQARNWLPGPCYRQQRLSKTANDNNNSNFPWTAASKYHLNGRDSLVNPGPAMASHKDDEEKFFPMHGNLIFGKEGTTASNAELDNVMITDEEEIRTTNPVATEQYGTVANNLQSSNTAPTTRTVNDQGALPGMVWQDRDVYLQGPIWAKIPHTDGHFHPSPLMGGFGLKHPPPQIMIKNTPVPANPPTTFSPAKFASFITQYSTGQVSVEIEWELQKENSKRWNPEIQYTSNYNKSVNVDFTVDTNGVYSEPRPIGTRYLTRNL

SEQ ID NO: 829 - protein, 736 aa, Artificial Sequence
  source: /note="Description of Artificial Sequence: Synthetic polypeptide"
MAADGYLPDWLEDNLSEGIREWWALKPGVPQPKANQQHQDNRRGLVLPGYKYLGPGNGLDKGEPVNEADAAALEHDKAYDQQLKAGDNPYLKYNHADAEFQERLQEDTSFGGNLGRAVFQAKKRILEPLGLVEEAAKTAPGKKRPVDQSPQEPDSSSGVGKSGKQPARKRLNFGQTGDSESVPDPQPLGEPPAAPTSLGSNTMASGGGAPMADNNEGADGVGNSSGNWHCDSQWLGDRVITTSTRTWALPTYNNHLYKQISGQSGASNDNHYFGYSTPWGYFDFNRFHCHFSPRDWQRLINNNWGFRPKKLSFKLFNIQVKEVTQNDGTTTIANNLTSTVQVFTDSEYQLPYVLGSAHQGCLPPFPADVFMVPQYGYLTLNNGSQAVGRSSFYCLEYFPSQMLRTGNNFQFSYTFEDVPFHSSYAHSQSLDRLMNPLIDQYLYYLNRTQGTTSGTTNQSRLLFSQAGPQSMSLQARNWLPGPCYRQQRLSKTANGNNNSNFPWTAASKYHLNGRDSLVNPGPAMASHKDDEEKFFPMHGNLIFGKEGTTASNAELDNVMITDEEEIRTTNPVATEQCGTVANNLQSSNTAPTTRTVNDQGALPGMVWQDRDVYLQGPIWAKIPHTDGHFHPSPLMGGFGLKHPPPQIMIKNTPVPANPPTTFSPAKFASFITQYSTGQVSVEIEWELQKENSKRWNPEIQYTSNYNKSVNVDFTVDTNGVYSEPRPIGTRYLTRNL

SEQ ID NO: 830 - protein, 736 aa, Artificial Sequence
  source: /note="Description of Artificial Sequence: Synthetic polypeptide"
MAADGYLPDWLEDNLSEGIREWWALKPGVPQPKANQQHQDNRRGLVLPGYKYLGPGNGLDKGEPVNEADAAALEHDKAYDQQLKAGDNPYLKYNHADAEFQERLQEDTSFGGNLGRAVFQAKKRILEPLGLVEGAAKTAPGKKRPVDQSPQEPDSSSGVGKSGKQPARKRLNFGQTGDSESVPDPQPLGEPPAAPTSLGSNTMASGGGAPMADNNEGADGVGNSSGNWHCDSQWLGDRVITTSTRTWALPTYNSHLYKQISSQSGASNDNHYFGYSTPWGYFDFNRFHCHFSPRDWQRLINNNWGFRPKKLSFKLFNIQVKEVTQNDGTTTIANNLTSTVQVFTDSEYQLPYVLGSAHQGCLPPFPADAFMVPQYGYLTLNNGSQAVGRSSFYCLEYFPSQMLRTGNNFQFSYTFEDVPFHGSYAHSQSLDRLMNPLIDQYLYYLNRTQGTTSGTTNQSRLLFSQAGPQSMSLQARNWLPGPCYRQQRLSKTANDNNNSNFPWTAASKYHLNGRDSLVNPGPAMASHKDDEEKFFPMHGNLIFGKEGTTASNAELDNVMITDEEEIRTTNPVATEQYGTVANNLQSSNTAPTTRTVNDQGALPGMVWQDRDVYLQGPIWAKIPHTDGHFHPSPLMGGFGLKHPPPQIMIKNTPVPANPPTTFSPAKFASFITQYSTGQVSVEIEWELQKENSKRWNPEIQYTSNYNKSVNVDFTVDTNGVYSEPRPIGTRYLTRNS

SEQ ID NO: 831 - protein, 736 aa, Artificial Sequence
  source: /note="Description of Artificial Sequence: Synthetic polypeptide"
MAADGYLPDWLEDNLSEGIREWWALKPGVPQPKANQQHQDNRRGLVLPGYKYLGPGNGLDKGEPVNEADAAALEHDKAYDQQLKAGDNPYLKYNHADAEFQERLQEDTSFGGNLGRAVFQAKKRILEPLGLVEGAAKTAPGKKRPVDQSPQEPDSSSGVGKSGKQLARKRLNFGQTGDSESVPDPQPLGEPPAAPTSLGSNTMASGGGAPMADNNEGADGVGNSSGNWHCDSQWLGDRVITTSTRTWALPTYNSHLYKQISGQSGASNDNHYFGYSTPWGYFDFNRFHCHFSPRDWQRLINNNWGFRPKKLSFKLFNIQVKEVTQNDGTTTIANNLTSTVQVFTDSEYQLPYVLGSAHQGCLPPFPADVFMVPQYGYLTLNNGSQAVGRSSFYCLEYFPSQMLRTGNNFQFSYTFEDVPFHSSYAHSQSLDRLMNPLIDQYLYYLNRTQGTTSGTTNQSRLLFSQAGPQSMSLQARNWLPGPCYRQQRLSKTANDNNNSNFPWTAASKYHLNGRDSLVNPGPAMASHKDDEEKFFPMHGNLIFGKEGTTASNAELDNVMITDEEEIRTTNPVATEQYGTVANNLQSSNTAPTTRTVNDQGALPGMVWQDRDVYLQGPIWAKIPHTDGHFHPSPLMGGFGLKHPPPQIMIKNTPVPANPPTTFSPAKFASFITQYSTGQVSVEIEWELQKENSKRWNPEIQYTSNYNKSVNVDFTVDTNGVYSEPRPIGTRYLTRNL

SEQ ID NO: 832 - protein, 736 aa, Artificial Sequence
  source: /note="Description of Artificial Sequence: Synthetic polypeptide"
MAADGYLPDWLEDNLSEGIREWWALKPGVPQPKANQQHQDDRRGLVLPGYKYLGPGNGLDKGEPVNEADAAALEHDKAYDQQLKAGDNPCLKYNHADAEFQERLQEDTSFGGNLGRAVFQAKKRILEPLGLVEEAAKTAPGKKRPVDQSPQEPDSSSGVGKSGKQPARKRLNFGQTGDSESVPDPQPLGEPPAAPTSLGSNTMASGGSAPMADNNEGADGVGNSSGNWHCDSQWLGDRVITTSTRTWALPTYNNHLYKQISSQSGASNDNHYFGYSTPWGYFDFNRFHCHFSPRDWQRLINNNWGFRPKKLSFKLFNIQVKEVTQNDGTTTIANNLTSTVQVFTDSEYQLPYVLGSAHQGCLPPFPADVFMVPQYGYLTLNNGSQAVGRSSFYCLEYFPSQMLRTGNNFQFSYTFEDVPFHSSYAHSQSLDRLMDPLIDQYLYYLNRTQGTTSGTTNQSRLLFSQAGPQSMSLQARNWLPGPCYRQQRLSKTANDNNNSNFPWTAASKYHLNGRDSLVNPGPAMASHKDDEEKFFPMHGNLIFGKEGTTASNAELDNVMITDEEEIRTTNPVATEQYGTVANNLQSSNTAPTTRTVNDQGALPGMVWQDRDVYLQGPIWAKIPHTDGHFHPSPLMGGFGLKHPPPQIMIKNTPVPANPPTTFSPAKFASFITQYSTGQVSVEIEWELQKENSKRWNPEIQYTSNYNKSVNVDFTVDTNGVYSEPRPIGTRYLTRNL

SEQ ID NO: 833 - protein, 736 aa, Artificial Sequence
  source: /note="Description of Artificial Sequence: Synthetic polypeptide"
MAADGYLPDWLEDNLSEGIREWWALKPGVPQPKANQQHQDDRRGLVLPGYKYLGPGNGLDKGEPVNEADAAALEHDKAYDQQLKAGDNPYLKYNHADAEFQERLQEDTSFGGNLGRAVFQAKKRILEPLGLVEEAAKTAPGKKRPVDQSPQEPDSSSGVGKSGKQPARKRLNFGQTGDSESVPDPQPLGEPPAAPTSLGSNTMASGGGAPMADNNEGADGVGNSSGNWHCDSQWLGNRVITTSTRTWALPTYNNHLYKQISSQSGASNDNHYFGYSTPWGYFDFNRFHCHFSPRDWQRLINNNWGFRPKKLSFKLFNIQVKEVTQNDGTTTIANNLTSTVQVFTDSEYQLPYVLGSAHQGCLPPFPADVFMVPQYGYLTLNNGSQAVGRSSFYCLEYFPSQMLRTGNNFQFSYTFEDVPFHSSYAHSQSLDRLMNPLIDQYLYYLNRTQGTTSGTTNQSRLLFSQAGPQSMSLQARNWLPGPCYRQQRLSKTANDNNNSNFPWTAASKYHLNGRDSLVNPGPAMASHKDDEEKFFPMHGNLIFGKEGTTASNAELDNVMITDEEEIRTTNPVATEQYGTVANNLQSSNTAPTTRTVNDQGALPGMVWQDRDVYLQGPIWAKIPHTDGHFHPSPLMGGFGLKHPPPQIMIKNTPVPANPPTTFSPAKFASFITQYSTGQVSVEIEWELQKENSKRWNPEIQYTSNYNKSVNVDFTVDTNGVYSEPRPIGTRYLTRNL

SEQ ID NO: 834 - protein, 736 aa, Artificial Sequence
  source: /note="Description of Artificial Sequence: Synthetic polypeptide"
MAADGYLPDWLEDNLSEGIREWWALKPGVPQPKANQQHQDDRRGLVLPGYKYLGPGNGLDKGEPVNEADAAALEHDKAYDQQLKAGDNPYLKYNHADAEFQERLQEDTSFGGNLGRAVFQAKKRILEPLGLVEEAAKTAPGKKRPVDQSPQEPDSSSGVGKSGKQPARKRLNFGQTGDSESVPDPQPLGEPPAAPTSLGSNTMASGGGAPMADNNEGADGVGNSSGNWHCDSQWLGDRVITTSTRTWALPTYNNHLYKQISSQSGASNDNHYFGYSTPWGYFDFNRFHCHFSPRDWQRLINNNWGFRPKKLSFKLFNIQVKEVTQNDGTTTIANNLTSTVQVFTDSEYQLPYVLGSAHQGCLPPFPADVFMVPQYGYLTLNNGSQAVGRSSFYCLEYFPSQMLRTGNNFQFSYTFEDVPFHSSYAHSQSLDRLMNPLIDQYLYYLNRTQGTTSGTTNQSRLLFSQAGPQSMSLQARNWLPGPCYRQQRLSKTANDNNNSNFPWTAASKYHLNGRDSLVNPGPAMASHKDDEEKFFPMHGNLIFGKEGTTASNAELDNVMITDEEEIRTTNPVATVQYGTVANNLQSSNTAPTTRTVNDQGALPGMVWQDRDVYLQGPIWAKIPHTDGHFHPSPLMGGFGLKHPPPQIMIKNTPVPANPPTTFSPAKFASFITQYSTGQVSVEIEWELQKENSKRWNPEIQYTSNYNKSVNVDFTVDTNGVYSEPRPIGTRYLTRNL

SEQ ID NO: 835 - protein, 735 aa, Artificial Sequence
  source: /note="Description of Artificial Sequence: Synthetic polypeptide"
MAADGYLPDWLEDNLSEGIREWWALKPGVPQPKANQQHQDNRRGLVLPGYKYLGPGNGLDKGEPVNEADAAALEHDKAYDQQLKAGDNPYLKYNHADAEFQERLQEDTSFGGNLGRAVFQAKKGILEPLGLVEEAAKTAPGKKRPVDQSPQEPDSSSGVGKSGKQPARKRLNFGQTGDSESVPDPQPLGEPPAAPTSLGSNTMASGGGAPMADNNEGADGVGNSSGNWHCDSQWLGDRVITTSTRTWALPTYNNHLYKQISSQSGASNDNHYFGYSTPWGYFDFNRFHCHFSPRDWQRLINNNWGFRPKKLSFKLFNIQVKEVTQNDGTTTIANNLTSTVQVFTDSEYQLPYVFGSAHQGCLPPFPADVFMVPQYGYLTLNNGSQAVGRSSFYCLEYFPSQMLRTGNNFQFSYTFEDVPFHSSYAHSQSSDRLMNPLIDQYLYYLNRTQGTTSGTTNQSRLLFSQAGPQSMSLQARNWLPGPCYRQQRLSKTANDNNNSNFPTAASKYHLNGRDSLVNPGPAMASHKDDEEKFFPMHGNLIFGKEGTTASNAELDNVMITDEEEIRTTNPVATEQYGTVANNLQSSNTAPTTRTVNDQGALPGMVWQDRDVYLQGPIWAKIPHTDGHFHPSPLMGGFGLKHPPPQIMIKNTPVPANPPTTFSPAKFASFITQYSTGQVSVEIEWELQKENSKRWNPEIQYTSNYNKSVNVDFTVDTNGVYSEPRPIGTRYLTRNL

SEQ ID NO: 836 - protein, 736 aa, Artificial Sequence
  source: /note="Description of Artificial Sequence: Synthetic polypeptide"
MAADGYLPDWLEDNLSEGIREWWALKPGVPQPKANQQHQDNRRGLVLPGYKYLGPGNGLDEGEPVNEADAAALEHDKAYDQQLKAGDNPYLKYNHADAEFQERLQEDTSFGGNLGRAVFQAKKRILEPLGLVEGAAKTAPGKKRPVDQSPQEPDSSSGVGKSGKQPARKRLNFGQTGDSESVPDPQPLGEPPAAPTSLGSNTMASGGGAPMADNNEGADGVGNSSGNWHCDSQWLGDRVITTSTRTWALPTYNSHLYKQISSQSGASNDNHYFGYSTPWGYFDFNRFHCHFSPRDWQRLINNNWGFRPKKLSFKLFNIQVKEVTQNDGTTTIANNLTSTVQVFTDSEYQLPYVLGSAHQGCLPPFPADVFMVPQYGYLTLNNGSQAVGRSSFYCLEYFPSQMLRTGNNFQFSYTFEDVPFHSSYAHSQSLDRLMNPLIDQYLYYLNRTQGTTSGTTNQSRLLFSQAGPQSMSLQARNWLPGPCYRQQRLSKTANDNNNSNFPWTAASKYHLNGRDSLVNPGPAMASHKDDEEKFFPMHGNLIFGKEGTTASNAELDNVMITDEEEIRTTNPVATEQYGTVANNLQSSNTAPTTRTVNDQGALPGMVWQDRDVYLQGPIWAKIPHTDGHFHPSPLMGGFGLKHPPPQIMIKNTPVPANPPTTFSPAKFASFITQYSTGQVSVEIEWELQKENSKRWNPEIQYTSNYNKSVNVDFTVDTNGVYSEPRPIGTRYLTRNL

SEQ ID NO: 837 - protein, 668 aa, Artificial Sequence
  source: /note="Description of Artificial Sequence: Synthetic polypeptide"
MAADGYLPDWLEDNLSEGIREWWALKPGVPQPKANQQHQDNRRGLVLPGYKYLGPGNGLDKGEPVNEADAAALEHDKAYDQQLKAGDNPYLKYNHADAEFQERLQEDTSFGGNLGRAVFQAKKRILEPLGLVEGAAKTAPGKKRPVDQSPQEPDSSSGVGKSGKQPARKRLNFGQTGDSESVPDPQPLGEPPAAPTSLGSNTMASGGGAPMADNNEGADGVGNSSGNWHCDSQWLGDRVITTSTRTWALPTYNSHLYKQISSQSGASNDNHYFGYSTPWGILTLTDSTATSHHVTGSDSLTTTGDSGPRNSASSSSTSKLKRSRRTMARRLLPITLPARFKCLRTRSISSRTCSGRRTKAVSRRFQRTPSWSLSMDTSPTTEVKRWDAHPFTAWSTSLRRCGLEITSNSAIPSRMYLFTAATLTARVWIAILLLISICTTTERKEQPLEQPTNHGCFLARLGLSLCLCRPEIGYLGPATGNRDFQRLLTTTTTVTFLGQRPANIISMAATRWIQDQLWPVTRTMKKNFSLCTAIRGPYLAWCGKIVTCTFKDLSGQRFLTRMDTFILLLWEALDNIRLLKSSKILRYRQILRRLSARPSLLHLSLSTPLDRSAWKLSGSYRKKTANVGIQRFSTLPTTTSLLMWTLLTLMVFIVNLALLEPGISHETC

SEQ ID NO: 838 - protein, 734 aa, Artificial Sequence
  source: /note="Description of Artificial Sequence: Synthetic polypeptide"
MTDGYLPDWLEDNLSEGVREWWALQPGAPKPKANQQHQDNARGLVLPGYKYLGPGNGLDKGEPVNAADAAALEHDKAYDQQLKAGDNPYLKYNHADAEFQQRLQGDTSFGGNLGRAVFQAKKRVLEPLGLVEQAGETAPGKKRPLIESPQQPDSSTGIGKKGKQPAKKKLVFEDETGAGDGPPEGSTSGAMSDDSEMRAATGGAAVEGGQGADGVGNASGDWHCDSTWSEGHVTTTSTRTWVLPTYNNHLYKRLGESLQSNTYNGFSTPWGYFDFNRFHCHFSPRDWQRLINNNWGMRPKAMRVKIFNIQVKEVTTSNGETTVANNLTSTVQIFADSSYELPYVMDAGQEGSLPPFPNDVFMVPQYGYCGLVTGNTSQQQTDRNAFYCLEYFPSQMLRTGNNFEITYSFEKVPFHSMYAHSQSLDRLMNPLIDQYLWGLQSTTTGTTLNAGTATTNFTKLRPTNLSNFKKNWLPGPSIKQQGFSKTANQNYKIPATGSDSLIKYETHSTLDGRWSALTPGPPMATAGPADSKFSNSQLIFAGPKQNGNTATVPGTLIFTSEEELAATNATDTDMWGNLPGGDQSNSNLPTVDRLTALGAVPGMVWQNRDIYYQGPIWAKIPHTDGHFHPSPLIGGFGLKHPPPQIFIKNTPVPANPATTFSSTPVNSFITQYSTGQVSVQIDWEIQKERSKRWNPEVQFTSNYGQQNSLLWAPDAAGKYTEPRAIGTRYLTHHL

SEQ ID NO: 839 - protein, 734 aa, Artificial Sequence
  source: /note="Description of Artificial Sequence: Synthetic polypeptide"
MTDGYLPDWLEDNLSEGVREWWALQPGAPKPKANQQHQDNARGLVLPGYKYLGPGNGLDKGEPVNAADAAALEHDKAYDQQLKAGDNPYLKYNHADAEFQQRLQGDTSFGGNLGRAVFQAKKRVLEPLGLVEQAGETAPGKKRPLIESPQQPDSSTGIGKKGKQPAKKKLVFEDETGAGDGPPEGSTSGAMSDDSEMRAAAGGAAVEGGQGADGVGNASGDWHCDSTWSEGHVTTTSTRTWVLPTYNNHLYKRLGESLQSNTYNGFSTPWGYFDFNRFHCHFLPRDWQRLINNNWGVRPKAMRVKIFNIQVKEVTTSNGETTVANNLTSTVQIFADSSYELPYVMDAGQEGSLPPFPNDVFMVPQYGYCGLVTGDTSQQQTDRNAFYCLEYFPSQMLRTGNNFEITYSFEKVPFHSMYAHSQSLDRLMNPLIDQYLWGLQSTTTGTTLNAGTATTNFTKLRPTNFSNFKKNWLPGPSIKQQGFSKTANQNYKIPATGSDSLIKYETHSTLDGRWSALTPGPPMATAGPADSKFSNSQLIFAGPKQNGNTATVPGTLIFTSEEELAATNATDTDMWGNLPGGDQSNSNLPTVDRLTALGAVPGMVWQNRDIYYQGPIWAKIPHTDGHFHPSPLIGGFGLKHPPPQIFIKNTPVPANPATTFSSTPVNSFITQYSTGQVSVQIDWEIQKERSKRWNPEVQFTSNYGQQNSLLWAPDAAGKYTEPRAIGTRYLTHHL

SEQ ID NO: 840 - protein, 734 aa, Artificial Sequence
  source: /note="Description of Artificial Sequence: Synthetic polypeptide"
MTDGYLPDWLEDNLSEGVREWWALQPGAPKPKANQQHQDNARGLVLPGYKYLGPGNGLDEGEPVNAADAAALEHDKAYDQQLKAGDNPYLKYNHADAEFQQRLQGDTSFGGNLGRAVFQAKKRVLEPLGLVEQAGETAPGKKRPLIESPQQPDSSTGIGKKGKQPAKKKLVFEDETGAGDGPPEGSTSGAMSDDSEMRAAAGGAAVEGGQGADGVGNASGDWHCDSTWSEGHVTTTSTRTWVLPTYNNHLYKRLGESLQSNTYNGFSTPWGYFDFNRFHCHFSPRDWQRLINNNWGMRPKAMRVKIFNIQVKEVTTSNGETTVANNLTSTVQIFADSSYELPYVMDAGQEGSLPPFPNDVFMVPQYGYCGLVTGNTSQQQTDRNAFYCLEYFPSQMLRTGNNFEITYSFEKVPFHSMYAHSQSLDRLMNPLIDQYLWGLQSTTTGTTLNAGTATTNFTKLRPTNFSNFKKNWLPGPSIKQQGFSKTANQNYKIPATGSDSLIKYETHSTLDGRWSALTPGPPMATAGPADSKFSNSQLIFAGPKQNGNTATVPGTLIFTSEEELAATNATDTDMWGNLPGGDQSNSNLPTVDRLTALGAVPGMVWQNRDIYYQGPIWAKIPHTDGHFHPSPLIGGFGLKHPPPQIFIKNTPVPANPATTFSSTPVNSFITQYSTGQVSVQIDWEIQKERSKRWNPEVQFTSNYGQQNSLLWAPDAAGKYTEPRAIGTRYLTHHL

SEQ ID NO: 841 - protein, 734 aa, Artificial Sequence
  source: /note="Description of Artificial Sequence: Synthetic polypeptide"
MTDGYLPDWLEDNLSEGVREWWALQPGAPKPKANQQHQDNARGLVLPGYKYLGPGNGLDKGEPVNAADAAALEHDKAYDQQLKAGDNPYLKYNHADAEFQQRLQGDTSFGGNLGRAVFQAKKRVLEPLGLVEQAGETAPGKKRPLIESPQQPDSSTGIGKKGKQPAKKKLVFEDGTGAGDGPPEGSTSGAMSDDSEMRAAAGGAAVEGGQGADGVGNASGDWHCDSTWSEGHVTTTSTRTWVLPTYNNHLYKRLGESLQSNTYNGFPTPWGYFDFNRFHCHFSPRDWQRLINNNWGMRPKAMRVKIFNIQVKEVTTSNGETTAANNLTSTVQIFADSSYELPYVMDAGQEGSLPPFPNDVFMVPQYGYCGLVTGNTSQQQTDRNAFYCLEYFPSQMLRTGNNFEITYSFEKVPFHSMYAHSQSLDRLMNPLIDQYLWGLQSTTTGTTLNAGTATTNFTKLRPTNFSNFKKNWLPGPSIKQQGFSKTANQNYKIPATGSDSLIKYETHSTLDGRWSALTPGPPMATAGPADSKFSNSQLIFAGPKQNGNTATVPGTLIFTSEEELAATNATDTDMWGNLPGGDQSNSNLPTVDRLTALGAVPGMVWQNRDIYYQGPIWAKIPHTDGHFHPSPLIGGFGLKHPPPQIFIKNTPVPANPATTFSSTPVNSFITQYSTGQVSVQIDWEIQKERSKRWNPEVQFTSNYGQQNSLLWAPDAAGKYTEPRAIGTRYLTHHL

SEQ ID NO: 842 - protein, 734 aa, Artificial Sequence
  source: /note="Description of Artificial Sequence: Synthetic polypeptide"
MTDGYLPDWLEDNLSEGVREWWALQPGAPKPKANQQHQDNARGLVLPGYKYLGPGNGLDKGEPVNAADAAALEHDKAYDQQLKAGDNPYLKYNHADAEFQQRLQGDTSFGGNLGRAVFQAKKRVLEPLGLVEQAGETAPGKKRPLIESPQQPDSSTGIGKKGKQPAKKKLVFEDETGAGDGPPEGSTSGAMSDDSEMRAAAGGAAVEGGQGADGVGNASGDWHCDSTWSEGHVTTTSTRTWVLPTYNNHLYKRLGESLQSNTYNGFSTPWGYFDFNRFHCHFSPRDWQRLINNNWGMRPKAMRVKIFNIQVKEVTTSNGETTVANNLTSTVQIFADSSYELPYVMDAGQEGSLPPFPNDVFMVPQYGYRGLVTGNTSQQQTDRNAFYCLEYFPSQMLRTGNNFEITYSFEKVPFHSMYAHSQSLDRLMNPLIDQYLWGLQSTTTGTTLNAGTATTNFTKLRPTNFSNFKKNWLPGPSIKQQGFSKTANQNYKIPATGSDSLIKYETHSTLDGRWSALTPGPPMATAGPADSKFSNSQLIFAGPKQNGNTATVPGTLIFTSEEELAATNATDTDMWGNLPGGDQSNSNLPTVDRLTALGAVPGMVWQNRDIYYQGPIWAKIPHTDGHFHPSPLIGGFGLKHPPPQIFIKNTPVPANPATTFSSTPVNSFITQYSTGQVSVQIDWEIQKERSKRWNPEVQFTSNYGQQNSLLWAPDAAGKYTEPRAIGTRYLTHHL

SEQ ID NO: 843 - protein, 734 aa, Artificial Sequence
  source: /note="Description of Artificial Sequence: Synthetic polypeptide"
MTDGYLPDWLEDNLSEGVREWWALQPGAPKPKANQQHQDNARGLVLQGYKYLGPGNGLDKGEPVNAADAAALEHDKAYDQQLKAGDNPYLKYNHADAEFQQRLQGDTSFGGNLGRAVFQAKKRVLEPLGLVEQAGETAPGKKRPLIESPQQPDSSTGIGKKGKQPAKKKLVFEDETGAGDGPPEGSTSGAMSDDSEMRAAAGGAAVEGGQGADGVGNASGDWHCDSTRSEGHVTTTSTRTWVLPTYNNHLYKRLGESLQSNTYNGFSTPWGYFDFNRFHCHFSPRDWQRLINNNWGMRPKAMRVKIFNIQVKEVTTSNGETTVANNLTSTVQIFADSSYELPYVMDAGQEGSLPPFPNDVFMVPQYGYCGLVTGNTSQQQTDRNAFYCLEYFPSQMLRTGNNFEITYSFEKVPFHSMYAHSQSLDRLMNPLIDQYLWGLQSTTTGTTLNAGTATTNFTKLRPTNFSNFKKNWLPGPSIKQQGFSKTANQNYKIPATGSDSLIKYETHSTLDGRWSARTPGPPMATAGPADSKFSNSQLIFAGPKQNGNTATVPGTLIFTSEEELAATNATDTDMWGNLPGGDQSNSNLPTVDRLTALGAVPGMVWQNRDIYYQGPIWAKIPHTDGHFHPSPLIGGFGLKHPPPQIFIKNTPVPANPATTFSSTPVNSFITQYSTGQVSVQIDWEIQKERSKRWNPEVQFTSNYGQQNSLLWAPDAAGKYTEPRAIGTRYLTHHL

SEQ ID NO: 844 - protein, 724 aa, Artificial Sequence
  source: /note="Description of Artificial Sequence: Synthetic polypeptide"
MSFVDHPPDWLEEVGEGLREFLGLEAGPPKPKPNQQHQDQARGLVLPGYNYLGPGNGLDRGEPVNRADEVAREHDISYNEQLEAGDNPYLKYNHADAEFQERLADDTSFGGNLGKAVFQAKKRVLEPFGLVEEGAKTAPTGKRIDDHFPKRKKARTEEDSKPSTSSDAEAGPSGSQQLQIPAQPASSLGADTMSAGGGGPLGDNNQGADGVGNASGDWHCDSTWMGDRVVTKSTRTWVLPSYNNHQYREIKSGSVDGSNANAYFGYSTPWGYFDFNRFHSHWSPRDWQRLINNYWGFRPRSLRVKIFNIQVKEVTVQDSTTTIANNLTSTVQVFTDDDYQLPYVVGNGTEGCLPAFPPQVFTLPQYGYATLNRDNTENPTERSSFFCLEYFPSKMLRTGNNFEFTYNFEEVPFHSSFAPSQNLFKLANPLVDQYLYRFVSTNNTGGVQFNKNLAGRYANTYKNWFPGPMGRTQGWNLGSGVNRASVSAFATTNRMELEGASYQVPPQPNGMTNNLQGSNTYALENTMIFNSQPANPGTTATYLEGNMLITSESETQPVNRVAYNVGGQMATNNQSSTTAPATGTYNLQEIVPGSVWMERDVYLQGPIWAKIPETEAHFHPSPAMGGFGLKHPPPMMLIKNTPVPGNITSFSDVPVSSFITQYSTGQVTVEMEWELKKENSKRWNPEIQYTNNYNDPQFVDFAPDSTGEYRTTRPIGTRYLTRPL

SEQ ID NO: 845 - protein, 724 aa, Artificial Sequence
  source: /note="Description of Artificial Sequence: Synthetic polypeptide"
MSFVDHPPDWLEEVGEGLREFLGLEAGPPKPKPNQQHQDQARGLVLPGYNYLGPGNGLDRGEPVNRADEVAREHDISYNEQLEAGDNPYLKYNHADAEFQEKLADDTSSGGNLGKAVFQAKKRVLEPFGLVEEGAKTAPTGKRIDDHFPKRKKARTEEDSKPSTSSDAEAGPSGSQQLQIPAQPASSLGADTMSAGGGGPLGDNNQGADGVGNASGDWHCDSTWMGDRVVTKSTRTWVLPSYNNHQYREIKSGSVDGSNANAYFGYSTPWGYFDFNRFHSHWSPRDWQRLINNYWGFRPRSLRVKIFNIQVKEVTVQDSTTTIANNLTSTVQVFTDDDYQLPYVVGNGTEGCLPAFPPQVFTLPQYGYATLNRDNTENPTERSSFFCLEYFPSKMLRTGNNFEFTYNFEEVPFHSSFAPSQNLFKLANPLVDQYLYRFVSTNNTGGVQFNKNLAGRYANTYKNWFPGPMGRTQGWNLGSGVNRASVSAFATTNRMELEGASYQVPPQPNGMTNNLQGSNTYALENTMIFNSQPANPGTTATYLEGNMLITSESETQPVNRVAYNVGGQMATNNQSSTTAPATGTYNLQEIVPGSVWMERDVYLQGPIWAKIPETGAHFHPSPAMGGFGLKHPPPMMLIKNTPVPGNITSFSDVPVSSFITQYSTGQVTVEMEWELKKENSKRWNPEIQYTNNYNDPQFVDFAPDSTGEYRTTRPIGTRYLTRPL

SEQ ID NO: 846 - protein, 724 aa, Artificial Sequence
  source: /note="Description of Artificial Sequence: Synthetic polypeptide"
MSFVDHPPDWLEEVGEGLREFLGLEAGPPKPKPNQQHQDQARGLVLPGYNYLGPGNGLDRGEPVNRADEVAREHDISYNEQLEAGDNPYLKYNHADAEFQEKLADDTSFGGNLGKAVFQAKKRVLEPFGLVEEGAKTAPTGKRIDDHFPKRKKARTEEDSKPSTSSDAEAGPSGSQQLQIPAQPASSLGADTMSAGGGGPLGDNNQGADGVGNASGDWHCDSTWMGDRVVTKSTRTWVLPSYNNHQYREIKSGSVDGSNANAYFGYSTPWGYFDFNRFHSHWSPRDWQRLINNYWGFRPRSLRVKIFNIQVKEVTVQDSTTTIANNLTSTVQVFTDDDYQLPYVVGNGTEGCLPAFPPQVFTLPQYGYATLNRDNTENPTERSSFFCLEYFPSKMLRTGNNFEFTYNFEEVPFHSSFAPSQNLFKLANPLVDQYLYRFVSTNNTGGVQFNKNLAGRYANTYKNWFPGPMGRTQGWNLGSGVNRASVSAFATTNRMELEGASYQVPPQPNGMTNNLQGSNTYALENTMIFNSQPANPGTTATYLEGNMLITSESETQPVNRVAYNVGGQMATNNQSSTTAPATGTYNLQEIVPGSVWMERDVYLQGPIWAKIPETGAHFHPSPAMGGFGLKHPPPMMLIKSTPVPGNITSFSDVPVSSFITQYSTGQVTVEMEWELKKENSKRWNPEIQYTNNYNDPQFVDFAPDSTGEYRTTRPIGTRYLTRPL

SEQ ID NO: 847 - protein, 724 aa, Artificial Sequence
  source: /note="Description of Artificial Sequence: Synthetic polypeptide"
MSFVDHPPDWLEEVGEGLREFLGPEAGPPKPKPNQQHQDQARGLVLPGYNYLGPGNGLDRGEPVNRADEVAREHDISYNEQLEAGDNPYLKYNHADAEFQEKLADDTSFGGNLGKAVFQAKKRVLEPFGLVEEGAKTAPTGKRIDDHFPKRKKVRTEEDSKPSTSSDAEAGPSGSQQLQIPAQPASSLGADTMSAGGGGPLGDNNQGADGVGNASGDWHCDSTWMGDRVVTKSTRTWVPPSYNNHQYREIKSGSVDGSNANAYFGYSTPWGYFDFNRFHSHWSPRDWQRLINNYWGFRPRSLRVKIFNIQVKEVTVQDSTTTIANNLTSTVQVFTDDDYQLPYVVGNGTEGCLPAFPPQVFTLPQYGYATLNRDNTENPTERSSFFCLEYFPSKMLRTGNNFEFTYNFEEVPFHSSFAPSQNLFKLANPLVDQYLYRFVSTNNTGGVQFNKNLAGRYANTYKNWFPGPMGRTQGWNLGSGVNRASVSAFATTNRMELEGASYQVPPQPNGMTNNLQGSNTYALENTMIFNSQPANPGTTATYLEGNMLITSESETQPVNRVACNVGGQMATNNQSSTTAPATGTYNLQEIVPGSVWMERDVYLQGPIWAKIPETGAHFHPSPAMGGFGLKHPPPMMLIKNTPVPGNITSFSDVPVSSFITQYSTGQVTVEMEWELKKENSKRWNPEIQYTNNYNDPQFVDFAPDSTGEYRTTRPIGTRYLTRPL

SEQ ID NO: 848 - protein, 724 aa, Artificial Sequence
  source: /note="Description of Artificial Sequence: Synthetic polypeptide"
MSFVDHPPDWLEEVGEGLREFLGLEAGPPKPKPNQQHQDQARGLVLPGYNYLGPGNGLDRGEPVNRADEVAREHDISYNEQLEAGDNPYLKYNHADAEFQEKLADDTSFGGNLGKAVFQAKKRVLEPFGLVEEGAKTAPTGKRIDDHFPKRKKARTEEDSKPSTSSDAEAGPSGSQQLQIPAQPASSLGADTMSAGGGGPLGDNNQGADGVGNASGDWHCDSTWMGDRVVTKSTRTWVLPSYNNHQYREIKSGSVDGSNANAYFGYSTPWGYFDFNRFHSHWSPRDWQRLINNYWGFRPRSLRVKIFNIQVKEVTVQDSTTTIANNLTSTVQVFTDDDYQLPYVVGNGTEGCLPAFPPQVFTLPQYGYATLNRDNTENPTERSSFFCLEYFPSKMLRTGNNFEFTYNFEEVPFHSSFAPSQNLFKLANPLVDQYLYRFVSTNNTGGVQFNKNLAGRYANTYKNWFPGPMGRTQGWNLGSGVNRASVSAFATTNRMELEGASYQVPPQPNGMTNNLQGSNTYALENTMIFNSQPANPGTTATYLEGNMLITSESETQPVNRVAYNVGGQMATNNQSSTTAPATGAYNLQEIVPGSVWMERDVYLQGPIWAKIPETGAHFHPSPAMGGFGLKHPPPMMLIKNTPVPGNITSFSDVPVSSFITQYSTGQVTVEMEWELKKENSKRWNPEIQYTNNYNDPQFVDFAPDSTGEYRTTRPIGTRYLTRPL

SEQ ID NO: 849 - protein, 724 aa, Artificial Sequence
  source: /note="Description of Artificial Sequence: Synthetic polypeptide"
MSFVDHPPDWLEEVGEGLREFLGLEAGPPKPKPNQQHQDQARGLVLPGYNYLGPGNGLDRGEPVNRADGVAREHDISYNEQLEAGDNPYLKYNHADAEFQEKLADDTSFGGNLGKAVFQAKKRVLEPFGLVEEGAKTAPTGKRIDDHFPKRKKARTEEDSKPSTSSDAEAGPSGSQQLQIPAQPASSLGADTMSAGGGGPLGDNNQGADGVGNASGDWHCDSTWMGDRVVTKSTRTWVLPSYNNHQYREIKSGSVDGSNANAYFGYSTPWGYFDFNRFHSHWSPRDWQRLINNYWGFRPRSLRVKIFNIQVKEVTVQDSTTTIANNLTSTVQAFTDDDYQLPYVVGNGTEGCLPAFPPQVFTLPQYGYATLNRDNTENPTERSSFFCLEYFPSKMLRTGNNFEFTYNFEEVPFHSSFAPSQNLFKLANPLVDQYLYRFVSTNNTGGVQFNKNLAGRYANTYKNWFPGPMGRTQGWNLGSGVNRASVSAFATTNRMELEGASYQVPPQPNGMTNNLQGSNTYALENTMIFNSQPANPGTTATYLEGNMLITSESETQPVNRVAYNVGGQMATNNQSSTTAPATGTYNLQEIVPGSVWMERDVYLQGPIWAKIPETGAHFHPSPAMGGFGLKHPPPMMLIKNTPVPGNITSFSDVPVSSFITQYSTGQVTVEMEWELKKENSKRWNPEIQYTNNYNDPQFVDFAPDSTGEYRTTRPIGTRYLTRPL

SEQ ID NO: 850 - protein, 723 aa, Artificial Sequence
  source: /note="Description of Artificial Sequence: Synthetic polypeptide"
MSFVDHPPDWLEEVGEGLREFLGLEAGPPKPKPNQQHQDQARGLVLPGYNYLGPGNGLDRGEPVNRADEVAREHDISYNEQLEAGDNPYLKYNHADAEFQEKLADDTSFGGNLGKAVFQAKKRVLEPFGLVEEGAKTAPTGKRIDDHFPKRKKARTEEDSKPSTSSDAEAGPSGSQQLQIPAQPASSLGADTMSAGGGGPLGDNNQGADGVGNASGDWHCDSTWMGDRVVTKSTRTWVLPSYNNHQYREIKSGSVDGSNANAYFGYSTPWGYFDFNRFHSHWSPRDWQRLINNYWGFRPRSLRVKIFNIQVKEVTVQDSTTTIANNLTSTVQVFTDDDYQLPYVVGNGTEGCLPAFPPQVFTLPQYGYATLNRDNTENPTERSSFFCLEYFPSKMLRTGNNFEFTYNFEEVPFHSSFAPSQNLFKLANPLVDQYLYRFVSTNNTGGVQFNKNLAGRYANTYKNWFPGPMGRTQGWNLGSGVNRASVSAFATTNRMELEGASYVPPQPNGMTNNLQGSNTYALENTMIFNSQPANPGTTATYLEGNMLITSESETQPVNRVAYNVGGQMATNNQSSTTAPATGTYNLQEIVPGSVWMEGDVYLQGPIWAKIPETGAHFHPSPAMGGFGLKHPPPMMLIKNTPVPGNITSFSDVPVSSFITQYSTGQVTVEMEWELKKENSKRWNPEIQYTNNYNDPQFVDFAPDSTGEYRTTRPIGTRYLTRPL

SEQ ID NO: 851 - protein, 724 aa, Artificial Sequence
  source: /note="Description of Artificial Sequence: Synthetic polypeptide"
MSFVDHPPDWLEEVGEGLREFLGLEAGPPKPKPNQQHQDQARGLVLPGYNYLGPGNGLDRGEPVNRADEVAREHDISYNEQLEAGDNPYLKYNHADAEFQEKLADDTSFGGNLGKAVFQAKKRVLEPFGLVEEGAKTAPTGKRIDDHFPKRKKVRTEEDSKPSTSSDAEAGPSGSQQLQIPAQPASSLGADTMSAGGGGPLGDNNQGADGVGNASGDWHCDSTWMGDRVVTKSTRTWVLPSYNNHQYREIKSGSVDGSNANAYFGYSTPWGYFDFNRFHSHWSPRDWQRLINNYWGFRPRSLRVKIFNIQVKEVTVQDSTTTIANNLTSTVQVFTDDDYQLPYVVGNGTEGCLPAFPPQVFTLPQYGYATLNRDNTENPTERSSFFCLEYFPSKMLRTGNNFEFTYNFEEVPFHSSFAPSQNLFKLANPLVDQYLYRFVSTNNTGGVQFNKNLAGRYANTYKNWFPGPMGRTQGWNLGSGVNRASVSAFATTNRMELEGASYQVPPQPNGMTNNLQGSNTYALENTMIFNSQPANPGTTATYLEGNMLITSESETQPVNRVAYNVGGQMATNNQSSTTAPATGTYNLQEIVPGSVWMERDVYLQGPIWAKIPETGAHFHPSPAMGGFGLKHPPPMMLIKNTPVPGNITSFSDVPVSSFITQYSTGQVTVEMEWELKKENSERWNPEIQYTNNYNDPQFVDFAPDSTGEYRTTRPIGTRYLTRPL

SEQ ID NO: 852 - protein, 724 aa, Artificial Sequence
  source: /note="Description of Artificial Sequence: Synthetic polypeptide"
MSFVDHPPDWLEEVGEGLREFLGLEAGPPKPKPNQQHQDQARGLVLPGYNYLGPGNGLDRGEPVNRADEVAREHDISYSEQLEAGDNPYLKYNHADAEFQEKLADDTSFGGNLGKAVFQAKKRVLEPFGLVEEGAKTAPTGKRIDDHFPKRKKARTEEDSKPSTSSDAEAGPSGSQQLQIPAQPASSLGADTMSAGGGGPLGDNNQGADGVGNASGDWHCDSTWMGDRVVTKSTRTWVLPSYNNHQYREIKSGSVDGSNANAYFGYSTPWGYFDFNRFHSHWSPRDWQRLINNYWGFRPRSLRVKIFNIQVKEVTVQDSTTTIANNLTSTVQVFTDDDYQLPYVVGNGTEGCLPAFPPQVFTLPQYGYATLNRDNTENPTERSSFFCLEYFPSKMLRTGNNFEFTYNFEEVPFHSSFAPSQNLFKLANPLVDQYLYRFVSTNNTGGVQFNKNLAGRYANTYKNWFPGPMGRTQGWNLGSGVNRASVSAFATTNRMELEGASYQVPPQPNGMTNNLQGSNTYALENTMIFNSQPANPGTTATYLEGNMLITSESETQPVNRVAYNVGGQMATNNQSSTTAPATGTYNLQEIVPGSVWMERDVYLQGPIWAKIPETGAHFHPSPAMGGFGLKHPPPMMLIKNTPVPGNITSFSDVPVSSFITQYSTGQVTVEMEWELKKENSKRWNPEIQYTNNYNDPQFVDFAPDSTGEYRTARPIGTRYLTRPL

SEQ ID NO: 853 - protein, 724 aa, Artificial Sequence
  source: /note="Description of Artificial Sequence: Synthetic polypeptide"
MSFVDHPPDWLEEVGEGLREFLGPEAGPPKPKPNQQHQDQARGLVLPGYNYLGPGNGLDRGEPVNRADEVAREHDISYNEQLEAGDNPYLKYNHADAEFQEKLADDTSFGGNLGKAVFQAKKRVLEPFGLVEEGAKTAPTGKRIDDHFPKRKKARTEEDSKPSTSSDAEAGPSGSQQLQIPAQPASSLGADTMSAGGGGPLGDNNQGADGVGNASGDWHCDSTWMGDRVVTKSTRTWVLPSYNNHQYREIKSGSVDGSNANAYFGYSTPWGYFDFNRFHSHWSPRDWQRLINNYWGFRPRSLRVKIFNIQVKEVTVQDSTTTIANNLTSTVQVFTDDDYQLPYVVGNGTEGCLPAFPPQVFTLPQYGYATLNRDNTENPTERSSFFCLEYFPSKMLRTGNNFEFTYNFEEVPFHSSFAPSQNLFKLANPLVDQYLYRFVSTNNTGGVQFNKNLAGRYANTYKNWFPGPMGRTQGWNLGSGVNRASVSAFATTNRMELEGASYQVPPQPNGMTNNLQGSNTYALENTMIFNSQPANPGTTATYLEGNMLITSESETQPVNRVAYNVGGQMTTNNQSSTTAPATGTYNLQEIVPGSVWMERDVYPQGPIWAKIPETGAHFHPSPAMGGFGLKHPPPMMLIKNTPVPGNITSFSDVPVSSFITQYSTGQVTVEMEWELKKENSKRWNPEIQYTNNYNDPQFVDFAPDSTGEYRTTRPIGTRYLTRPL

SEQ ID NO: 854 - protein, 724 aa, Artificial Sequence
  source: /note="Description of Artificial Sequence: Synthetic polypeptide"
MSFVDHPPDWLEEVGEGLREFLGLEAGPPKPKPNQQHQDQARGLVLPGYNYLGPGNGLDRGEPVNRADEVAREHDISYNEQLEAGDNPYLKYNHADAEFQEKLADDTSFGGNLGKAVFQAKKRVLEPFGLVEEGAKTAPTGKRIDDHFPKRKKARTEEDSKPSTSSDAEAGPSGSQQLQIPAQPASSLGADTMSAGGGGPLGDNNQGADGVGNASGDWHCDSTWMGDRVVTKSTRTWVLPSYNNHQYREIKSGSVDGSNANAYFGYSTPWGYFDFNRFHSHWSPRDWQRLINNYWGFRPRSLRVKIFNIQVKEVTVQDSTTTIANNLTSTVQVFTDDDYQLPYVVGNGTEGCLPAFPPQVFTLPQYGYATLNRDNTENPTERSSFLCLEYFPSKMLRTGNNFEFTYNFEEVPFHSSFAPSQNLFKLANPLVDQYLYRFVSTNNTGGVQFNKNLAGRYANTYKNWFPGPMGRTQGWNLGSGVNRASVSAFATTNRMELEGASYQVPPQPNGMTNNLQGSNTYALENTMIFNSQPANPGTTATYLEGNMLITSESETQPVNRVAYNVGGQMATNNQSSTTAPATGTYNLQEIVPGSVWMKRDVYLQGPIWAKIPETGAHFHPSPAMGGFGLKHPPPMMLIKNTPVPGNITSFSDVPVSSFITQYSTGQVTVEMEWELKKENSKRWNPEIQYTNNYNDPQFVDFAPDSTGEYRTTRPIGTRYLTRPL

SEQ ID NO: 855 - protein, 724 aa, Artificial Sequence
  source: /note="Description of Artificial Sequence: Synthetic polypeptide"
MSFVDHPPDWLEEVGEGLREFLGLEAGPPKPKPNQQHQDQARGLVLPGYNYLGPGNGLDRGEPVNRADEVAREHDISYNEQLEAGDNPYLKYNHADAEFQEKLADDTSFGGNLGKAVFQAKKRVLEPFGLVEEGAKTAPTGKRIDDHFPKRKKARTEEDSKPSTPSDAEAGPSGSQQLQIPAQPASSLGADTMSAGGGGPLGDNNQGADGVGNASGDWHCDSTWMGDRVVTKSTRTWVLPSYNNHQYREIKSGSVDGSNANAYFGYSTPWGYFDFNRFHSHWSPRDWQRLINNYWGFRPRSLRVKIFNIQVKEVTVQDSTTTIANNLTSTVQVFTDDDYQLPYVVGNGTEGCLPAFPPQVFTLPQYGYATLNRDNTENPTERSSFFCLEYFPSKMLRTGNNFEFTYNFEEVPFHSSFAPSQNLFKLANPLVDQYLYRFVSTNNTGGVQFNKNLAGRYANTYKNWFPGPMGRTQGWNLGSGVNRASVSAFATTNRMELEGASYQVPPQPNGMTNNLQGSNTYALENTMIFNSQPANPGTTATYLEGNMLITSESETQPVNRVAYNVGGQMATNNQSSTTAPATGTYNLQEIVPGSVWMERDVYLQGPIWAKIPETGAHFHPSPAMGGFGLKHPPPMMLIKNTPVPGNITSFSDVPVSSFITQYSTGQVTVEMEWELKKENSKRWNPEIQYTNNYNDPQFVDFAPDSTGEYRTTRPIGTRYLTRPL

SEQ ID NO: 856 - protein, 724 aa, Artificial Sequence
  source: /note="Description of Artificial Sequence: Synthetic polypeptide"
MSFVDHPPDWLEEVGEGLREFLGLEAGPPKPKPNQQHQDQARGLVLPGYNYLGPGNGLDRGEPVNRADEVAREHDISYNEQLEAGDNPYLKYNHADAEFQEKLADDTSFGGNLGKAVFQAKKRVLEPFGLVEEGAKTAPTGKRIDDHFPKRKKARTEEDSKPSTSSDAEAGPSGSQQLQIPAQPASSLGADTMSAGGGGPLGDNNQGADGVGNASGDWHCDSTWMGDRVVTKSTRTWVLPSYNNHQYREIKSGSVDGSNANAYFGYSTPWGYFDFNRFHSHWSPRDWQRLINNYWGFRPRSLRVKIFNIQVKEVTVQDSTTTIANNLTSTVQVFTDDDYQLPYVVGNGTEGCLPAFPPQVFTLPQYGYATLNRDNTENPTERSSFFCLEYFPSKMLRTGNNFEFTYNFEEVPFHSSFAPSQNLFKLANPLVDQYLYRFVSTNNTGGVQFNKNLAGRYANTHKNWFPGPMGRTQGWNLGSGVNRASVSAFATTNRMELEGASYQVPPQSNGMTNNLRGSNTYALENTMIFNSQPANPGTTATYLEGNMLITSESETQPVNRVAYNVGGQMATNNQSSTTAPATGTYNLQEIVPGSVWMERDVYLQGPIWAKIPETGAHFHPSPAMGGFGLKHPPPMMLIKNTPVPGNITSFSDVPVSSFITQYSTGQVTVEMEWELKKENSKRWNPEIQYTNNYNDPQFVDFAPDSTGEYRTTRPIGTRYLTRPL

SEQ ID NO: 857 - protein, 724 aa, Artificial Sequence
  source: /note="Description of Artificial Sequence: Synthetic polypeptide"
MSFVDHPPDWLEEVGEGLREFLGLEAGPPKPKPNQQHQDQARGLVLPGYNYLGPGNGLDRGEPVNRADEVAREHDISYNEQLEAGDNPYLKYNHADAEFQEKLADDTSFGGNLGKAVFQAKKRVLEPFGLVEEGAKTAPTGKRIDDHFPKRKKARTEEDSKPSTSSDAEAGPSGSQQLQIPAQPASSLGADTMSAGGGGPLGDNNQGADGVGNASGDWHCDSTWMGDRVVTKSTRTWVLPSYNNHQYREIKSGSVDGSNANAYFGYSTPWGYFDFNRFHSHWSPRDWQRLINNYWGFRPRSLRVKIFNIQVKEVTVQDSTTTIANNLTSTVQVFTDDDYQLPYVVGNGTEGCLPAFPPQVFTLPQYGYATLNRDNTENPTERSSFFCLEYFPSKMLRTGNNFEFTYNFEEVPFHSSFAPSQNLFKLANPLVDQYLYRFVSTNNTGGVQFNKNLAGRYANTYKNWFPGPMGRTQGWNLGSGVNRASVSAFATTNRMELEGASYQVPPQPNGMTNNLQGSNTYALENTMIFNSQPANPGTTATYLEGNMLITSESETQPVNRVAYSVGGQMATNNQSSTTAPTTGTYNLQEIVPGSVWMERDVYLQGPIWAKIPETGAHFHPSPAMGGFRLKHPPPMMLIKNTPVPGNITSFSDVPVSSFITQYSTGQVTVEMEWELKKENSKRWNPEIQYTNNYNDPQFVDFAPDSTGEYRTTRPIGTRYLTRPL

SEQ ID NO: 858 - protein, 724 aa, Artificial Sequence
  source: /note="Description of Artificial Sequence: Synthetic polypeptide"
MSFVDHPPDWLEEVGEGLREFLGLEAGPPKPKPNQQHQDQARGLVLPGYNYLGPGNGLDRGEPVNRADEVAREHDISYNEQLEAGDNPYLKYNHADAEFQEKLADDTSFGGNLGKAVFQAKKRVLEPFGLVEEGAKTAPTGKRIDDHFPKRKKARTEEDSKPSTSSDAEAGPSGSQQLQIPAQPASSLGADTMSAGGGGPLGDNNQGADGVGNASGDWHCDSTWMGDRVVTKSTRTWVLPSYNNHQYREIKSGSVDGSNANAYFGYSTPWGYFDFNRFHSHWSPRDWQRLINNYWGFRPRSLRVKIFNIQVKEVTVQDSTTTIANNLTSTVQVFTDDDYQLPYVVGNGTEGCLPAFPPQVFTLPQYGYATLNRDNTENPTERSSFFCLEYFPSKMLRTGNNFEFTYNFEEVPFHSSFAPSQNLFKLANPLVDQYLYRFVSTNNTGGVQFNKNLAGRYANTYKNWFPGPMGRTQGWNLGSGVNRASVSAFAATNRMELEGASYQVPPQPNGMTNNLQGSNTYALENTMIFNSQPANPGTTATYLEGNMLITSESETQPVNRVAYNVGGQMATNNQSSTTAPATGTYNLQEIVPGGVWMERDVYLQGPIWAKIPETGAHFHPSPAMGGFGLKHPPPMMLIKNTPVPGNTTSFSDVPVSSFITQYSTGQVTVEMEWELKKENSKRWNPEIQYTNNYNDPQFVDFAPDSTGEYRTTRPIGTRYLTRPL

SEQ ID NO: 859 - protein, 724 aa, Artificial Sequence
  source: /note="Description of Artificial Sequence: Synthetic polypeptide"
MSFVDHPPDWLEEVGEGLREFLGLEAGPPKPKPNQQHQDQARGLVLPGYNYLGPGNGLDRGEPVNRADEVAREHDISYNEQLEAGDNPYLKYNHADAEFQEKLADDTSFGGNLGKVVFQAKKRVLEPFGLVEEGAKTAPTGKRIDDHFPKRKKARTEEDSKPSTSSDAEAGPSGSQQLQIPAQPASSLGADTMSAGGGGPLGGNNQGADGVGNASGDWHCDSTWMGDRVVTKSTRTWVLPSYNNHQYREIKSGSVDGSNANAYFGYSTPWGYFDFNRFHSHWGPRDWQRLINNYWGFRPRSLRVKIFNIQVKEVTVQDSTTTIANNLTSTVQVFTDDDYQLPYVVGNGTEGCLPAFPPQVFTLPQYGYATLNRDNTENPTERSSFFCLEYFPSKMLRTGNNFEFTYNFEEVPFHSSFAPSQNLFKLANPLVDQYLYRFVSTNNTGGVQFNKNLAGRYANTYKNWFPGPMGRTQGWNLGSGVNRASVSALATTNRMELEGASYQVPPQPNGMTNNLQGSNTYALENTMIFNSQPANPGTTATYLEGNMLITSESETQPVNRVAYNVGGQMATNNQSSTTAPATGTYNLQEIVPGSVWMERDVYLQGPIWAKIPETGAHFHPSPAMGGFGLKHPPPMMLIKNTPVPGNITSFSDVPVSSFITQYSTGQVTVEMEWELKKENSKRWNPEIQYTNNYNDPQFVDFAPDSTGEYRTTRPIGTRYLTRPL

SEQ ID NO: 860 - protein, 723 aa, Artificial Sequence
  source: /note="Description of Artificial Sequence: Synthetic polypeptide"
MSFVDHPPDWLEEVGEGLREFLGLEAGPPKPKPNQQHQDQARGLVLPGYNYLGPGNGLDRGEPVNRADEVAREHDISYNEQLEAGDNPYLKYNHADAEFQEKLADDTSFGGNLGKAVFQAKKRVLEPFGLVEEGAKTAPTGKRIDDHFPKRKKARTEEDSKPSTSSDAEAGPSGSQQLQIPAQPASSLGADTMSAGGGGPLGDNNQGADGVGNASGDWHCDSTWMGDRVVTKSTRTWVLPSYNNHQYREIKSGSVDGSNANAYFGYSTPWGYFDFNRFHSHWSPRDWQRLINNYWGFRPRSLRVKIFNIQVKEVTVQDSTTTIANNLTSTVQVFTDDDYQLPYVVGNGTEGCLPAFPPQVFTLPQYGYATLNRDNTENPTERSSFFCLEYFPSKMLRTGNNFEFTYNFEEVPFHSSFAPSQNLFKLANPLVDQYLYRFVSTNNTGGVQFNKNLAGRYANTYKNWFPGPMGRTQGWNLGSGVNRASVSAFATTNRMELEGASYQVPPQPNGMTNNLQGSNTYALENTMIFNSQPANPGTTATYLEGNMLITSESETQPVNRVAYNVGGQMATNNQSSTTAPATGTYNLQEIVPGSVWMERDVYLQGPIAKIPETGAHFHPSPAMGGFGLKHPPPMMLIKNTPVPGNITSFSDVPVSSFITQYSTGQVTVEMEWELKKENSKRWNPEIQYTNNYNDPQFVDFAPDSTGECRTTRPIGTRYLTRPL

SEQ ID NO: 861 - protein, 724 aa, Artificial Sequence
  source: /note="Description of Artificial Sequence: Synthetic polypeptide"
MSFVDHPPDWLEEVGEGLREFLGLEAGPPKPKPNQQHQDQARGLVLPGYNYLGPGNGLDRGEPVNRADEVAREHDISYNEQLEAGDNPYLKYNHADAEFQEKLADDTSFGGNLGKAVFQAKKRVLEPFGLVEEGAKTAPTGKRIDDHFPKRKKARTEEDSKPSTSSDAEAGPSGSQQLQIPAQPASSLGADTMSAGGGGPLGDNNQGADGVGNASGDWHCDSTWMGDRVVTKSTRTWVLPSYNNHQYREIKSGSVDGSNANAYFGYSTPWGYFDFNRFHSHWSPRDWQRLINNYWGFRPRSLRVKILNIQVKEVTVQDSTTTIANNLTSTVQVFTDDDYQLPYVVGNGTEGCLPAFPPQVFTLPQYGYATLNRDNTENPTERSSFFCLEYFPSKMLRTGNNFEFTYNFEEVPFHSSFAPSQNLFKLANPLVGQYLYRFVSTNNTGGVQFNENLAGRYANTYKNWFPGPMGRTQGWNLGSGVNRASVSAFATTNRMELEGASYQVPPQPNGMTNNLQGSNTYALENTMIFNSQPANPGTTATYLEGNMLITSESETQPVNRVAYNVGGQMATNNQSSTTAPATGTYNLQEIVPGSVWMERDVYLQGPIWAKIPETGAHFHPSPAMGGFGLKHPPPMMLIKNTPVPGNITSFSDVPVSSFITQYSTGQATVEMEWELKKENSKRWNPEIQYTNNYNDPQFVDFAPDSTGEYRTTRPIGTRYLTRPL

SEQ ID NO: 862 - protein, 724 aa, Artificial Sequence
  source: /note="Description of Artificial Sequence: Synthetic polypeptide"
MSFVDHPPDWLEEVGEGLREFLGLEAGPPKPKPNQQHQDQARGLVLPGYNYLGPGNGLDRGEPVNRADEVAREHDISYNEQLEAGDNPYLKYNHADAEFQEKLADDTSFGGNLGKAVFQAKKRVLEPFGLVEEGAKTAPTGKRIDDHFPKRKKARTEEDSKPSTSSDAEAGPSGSQQLQIPAQPASSLGADTMSAGGGGPLGDNNQGADGVGNASGDWHCDSTWMGDRVVTKSTRTWVLPSYNNHQYREIKSGSVDGSNANAYFGYSTPWGYFDFNRFHSHWSPRDWQRLINNYWGFRPRSLRVKIFNIQVKEVTVQDSTTIIANNLTSTVQVFTDDDYQLPYVVGNGTEGCLPAFPPQVFTLPQYGYATLNRDNTENPTERSSFFCLEYFPSKMLRTGNNFEFTYNFEEVPFHSSFAPSQNLFKLANPLVDQYLYRFVSTNNTGGVQFNKNLAGRYANTYKNWFPGPMGRTQGWNLGSGVNRASVSAFATTNRMELEGASYQVPPQPNGMTNNLQGSNTYALENTMIFNSQPANPGTTATYLEGNMLITSESETQPVNRVAYNVGGQMATNNQSSTTAPATGTYNLQEIVPGSVWMERDVYLQGPIWAKIPETGAHFHPSPAMGGFGLKHPPPMMLIKNTPVPGNITSFSDVPVSSFITQYSTGQVTVEMEWELKKENSKRWNPEIQYTNNYNDPQFVDFAPDSTGEYRTTRPIGTRYLTRPL

SEQ ID NO: 863 - protein, 724 aa, Artificial Sequence
  source: /note="Description of Artificial Sequence: Synthetic polypeptide"
MSFVDHPPDWLEEVGEGLREFLGLEAGPPKPKPNQQHQDQARGLVLPGYNYLGPGNGLDRGEPVNRADEVAREHDISYNEQLEAGDNPYLKYNHADAEFQEKLADDTSFGGNLGKAVFQAKKRVLEPFGLVEEGAKTAPTGKRIDDHFPKRKKARTEEDSKPSTSSDAEAGPSGSQQLQIPAQPASSLGADTMSAGGGGPLGDNNQGADGVGNASGDWHCDSTWMGDRVVTKSTRTWVLPSYNNHQYREIKSGSVDGSNANAYFGYSTPWGYFDFNRFHSHWSPRDWQRLINNYWGFRPRSLRVKIFNIQVKEVTVQDSTTTIANNLTSTVQVFTDDDYQLPYVVGNGTEGCLPAFPPQVFTLPQYGYATLNRDNTENPTERSSFFCLEYFPSKMLRTGNNFEFTYNFEEVPFHSSFAPSQNLFKLANPLVDQYLYRFVSTNNTGGVQFNKNLAGRYANTYKNWFPGPMGRTQGWNLGSGVNRASVSAFATTNRMELEGASYQVPPQPNGMTNNLQGSNTYALENTMIFNSQPANPGTTATYLEGNMLITSESETQPVNRVAYNVGGQMATNNQSSTTAPATGTYNLQEIVPGSVWMERDVYLQGPIWAKIPETGAHFHPSPAMGGFGLKHPPPMMLIKNTPVPGNITSLSDVPVSSFITQYSTGQVTVEMEWELKKENSKRWNPEIQYTNNYNDPQFVDFAPDSTGEYRTTRPIGTRYLTRPL

SEQ ID NO: 864 - protein, 724 aa, Artificial Sequence
  source: /note="Description of Artificial Sequence: Synthetic polypeptide"
MSFVDHPPDWLEEVGEGLREFLGLEAGPPKPKPNQQHQDQARGLVLPGYNYLGPGNGLDRGEPANRADEVAREHDISYNEQLEAGDNPYLKYNHAGAEFQEKLADDTSFGGNLGKAVFQAKKRVLEPFGLVEEGAKTAPTGKRIDDHFPKRKKARTEEDSKPSTSSDAEAGPSGSQQLQIPAQPASSLGADTMSAGGGGPLGDNNQGADGVGNASGDWHCDSTWMGDRVVTKSTRTWVLPGYNNHQYREIKSGSVDGSNANAYFGYSTPWGYFDFNRFHSHWSPRDWQRLINNYWGFRPRSLRVKIFNIQVKEVTVQDSTTTIANNLTSTVQVFTDDDYQLPYVVGNGTEGCLPAFPPQVFTLPQYGYATLNRDNTENPTERSSFFCLEYFPSKMLRTGNNFEFTYNFEEVPFHSSFAPSQNLFKLANPLVDQYLYRFVSTNNTGGVQFNKNLAGRYANTYKNWFPGPMGRTQGWNLGSGVNRASVSAFATTNRMELEGASYQVPPQPNGMTNNLQGSNTYALENTMIFNSQPANPGTTATYLEGNMLITSESETQPVNRVAYNVGGQMATNNQSSTTAPATGTYNLQEIVPGSVWMERDVYLQGPIWAKIPETGAHFHPSPAMGGFGLKHPPPMMLIKNTPVPGNITSFSDVPVSSFITQYSTGQVTVEMEWELKKENSKRWNPEIQYTNNYNDPQFVDFAPDSTGEYRTTRPIGTRYLTRPL

SEQ ID NO: 865 - protein, 724 aa, Artificial Sequence
  source: /note="Description of Artificial Sequence: Synthetic polypeptide"
MSFVDHPPDWLEEVGEGLREFLGLEAGPPKPKPNQQHQDQARGLVLPGYNYLGPGNGLDRGEPVNRADEVAREHDISYNEQLEAGDNPYLKYNHADAEFQEKLADDTSFGGNLGKAVFQAKKRVLEPFGLVEEGAKTAPTGKRIDDHFPKRKKARTEEDSKPPTSSDAEAGPSGSQQLQIPAQPASSLGADTMSAGGGGPLGDNNQGADGVGNASGDWHCDSTWMGDRVVTKSTRTWVLPSYNNHQYREIKSGSVDGSNANAYFGYSTPWGYFDFNRFHSHWSPRDWQRLINNYWGFRPRSLRVKIFNIQVKEVTVQDSATTIANNLTSTVQVFTDDDYQLPYVVGNGTEGCLPAFPPQVFTLPQYGYATLNRDNTENPTERSSFFCLEYFPSKMLRTGNNFEFTYNFEEVPFHSSFAPSQNLFKLANPLVDQYLYRFVSTNNTGGVQFNKNLAGRYANTYKNWFPGPMGRTQGWNLGSGVNRASVSAFATTNRMELEGASYQVPPQPNGMTNNLQGSNTYALENTMIFNSQPANPGTTATYLEGNMLITSESETQPVNRVAYNVGGQMATNNQSSTTAPATGTYNLQEIVPGSVWMERDVYLQGPIWAKIPETGAHFHPSPAMGGFGLKHPPPMMLIKNTPVPGNITSFSDVPVSSFITQYSTGQVTVEMEWELKKENSKRWNPEIQYTNNYNDPQFVDFAPDSTGEYRTTRPIGTRYLTRPL

SEQ ID NO: 866 - protein, 724 aa, Artificial Sequence
  source: /note="Description of Artificial Sequence: Synthetic polypeptide"
MSFVDHPPDWLEEVGEGLREFLGLEAGPPKPKPNQQHQDQARGLVLPGYNYLGPGNGLDRGEPVNRADEVAREHDISYNEQLEAGDNPYLKYNHADAEFQEKLADDTSFGGNLGKAVFQAKKRVLEPFGLVEEGAKTAPTGKRIDDHFPKRKKARTEEDSKPSTSSDAEAGPSGSQQPQIPAQPASSLGADTMSAGGGGPLGDNNQGADGVGNASGDWHCDSTWMGDRVVTKSTRTWVLPSYNNHQYREIKSGSVDGSNANAYFGYSTPWGYFDFNRFHSHWSPRDWQRLINNYWGFRPRSLRVKIFNIQVKEVTVQDSTTTIANNLTSTVQVFTDDDYQLPYVVGNGTEGCLPAFPPQVFTLPQYGYATLNRDNTENPTERSSFFCLEYFPSKMLRTGNNFEFTYNFEEVPFHSSFAPSQNLFKLANPLVDQYLYRFVSTNNTGGVQFNKNLAGRYANTYKNWFPGPMGRTQGWNLGSGVNRASVSAFATTNRMELEGASYQVPPQPNGMTNNLQGSNTYALENTMIFNSQPANPGTTATYLEGNMLITSESETQPVNRVAYNVGGQMATNNQSSTTAPATGTYNLQEIVPGSVWMERDVYLQGPIWAKIPETGAHFHPSPAMGGFGLKHPPPMMLIKNTPAPGNITSFSDVPVSSFITQYSTGQVTVEMEWELKKENSKRWNPEIQYTNNYNDPQFVDFAPDSTGEYRTTRPIGTRYLTRPL

SEQ ID NO: 867 - protein, 724 aa, Artificial Sequence
  source: /note="Description of Artificial Sequence: Synthetic polypeptide"
MSFVDHPPDWLEEVGEGLREFLGLEAGPPKPKPNQQHQDQARGLVLPGYNYLGPGNGLDRGEPVNRADEVAREHDISYNEQLEAGDNPYLKYNHADAEFQEKLADDTSFGGNLGKAVFQAKKRVLEPFGLVEEGAKTAPTGKRIDDHFPKRKKARTEEDSKPPTSSDAEAGPSGSQQLQIPAQPASSLGADTMSAGGGGPLGDNNQGADGVGNASGDWHCDSTWMGDRVVTKSTRTWVLPSYNNHQYREIKSGSVDGSNANAYFGYSTPWGYFDFNRFHSHWSPRDWQRLINNYWGFRPRSLRVKIFNIQVKEVTVQDSTTTIANNLTSTVQVFTDDDYQLPYVVGNGTEGCLPAFPPQVFTLPQYGYATLNRDNTENPTERSSFFCLEYFPSKMLRTGNNFEFTYNFEEVPFHSSFAPSQNLFKLANPLVDQYLYRFVSTNNTGGVQFNKNLAGRYANTYKNWFPGPMGRTQGWNLGSGVNRASVSAFATTNRMELEGASYQVPPQPNGMTNNLQGSNTYALENTMIFNSQPANPGTTATYLEGNMLITSESETQPVNRVAYNVGGQMATNNQSSTTAPATGTYNLQEIVPGSVWMERDVYLQGPIWAKIPETGAHFHPSPAMGGFGLKHPPPMMLIKNTPVPGNITSFSDVPVSSFITQYSTGQVTVEMEWELKKENSKRWNPEIQYTNNYNDPQFVDFAPDSTGEYRTTRPIGTRYLTRPL

SEQ ID NO: 868 - protein, 724 aa, Artificial Sequence
  source: /note="Description of Artificial Sequence: Synthetic polypeptide"
MSFVDHPPDWLEEVGEGLREFLGLEAGPPKPKPNQQHQDQARGLVLPGYNYLGPGNGLDRGEPVNRADEVAREHDISYNEQLEAGDNPYLKYNHADAEFQEKLADDTSFGGNLGKAVFQAKKRVLEPFGLVEEGAKTAPTGKRIDDHFPKRKKARTEEDSKPPTSSDAEAGPSGSQQLQIPAQPASSLGADTMSAGGGGPLGDNNQGADGVGNASGDWHCDSTWMGDRVVTKSTRTWVPPSYNNHQYREIKSGSVDGSNANAYFGYSTPWGYFDFNRFHSHWSPRDWQRLINNYWGFRPRSLRVKIFNIQVKEVTVQDSTTTIANNLTSTVQVFTDDDYQLPYVVGNGTEGCLPAFPPQVFTLPQYGYATLNRDNTENPTERSSFFCLEYFPSKMLRTGNNFEFTYNFEEVPFHSSFAPSQNLFKLANPLVDQYLYRFVSTNNTGGVQFNKNLAGRYANTYKNWFPGPMGRTQGWNLGSGVNRASVSAFATTNRMELEGASYQVPPQPNGMTNNLQGSNTYALENTMIFNSQPANPGTTATYLEGNMLITSESETQPVNRVAYNVGGQMATNNQSSTTAPATGTYNLQEIVPGSVWMERDVYLQGPIWAKIPETGAHFHPSPAMGGFGLKHPPPMMLIKNTPVPGNITSFSDVPVSSFITQYSTGQVAVEMEWELKKENSKRWNPEIQYTNNYNDPQFVDFAPDSTGEYRTTRPIGTRYLTRPL

SEQ ID NO: 869 - protein, 724 aa, Artificial Sequence
  source: /note="Description of Artificial Sequence: Synthetic polypeptide"
MSFVDHPPDWLEEVGEGLREFLGLEAGPPKPKPNQQHQDQARGLVLPGYNYLGPGNGLDRGEPVNRADEVAREHDISYNEQLEAGDNPYLKYNHADAEFQEKLADDTSFGGNLGKAVFQAKKRVLEPFGLVEEGAKTAPTGKRIDDHFPKRKKARTEEDSKPSTSSDAEAGPSGSQQLQIPAQPASSLGADTMSAGGGGPLGDNNQGADGVGNASGDWHCDSTWMGDRVVTKSTRTWVLPSYNNHQYREIKSGSVDGSNANAYFGYSTPWGYFDFNRFHSHWSPRDWQRLINNYWGFRPRSLRVKIFNIQVKEVTVQDSTTTIANNLTSTVQVFTDDDYQLPYVVGNGTEGCLPAFPPQVFTLPQYGYATLNRDNTENPTERSSFFCLEYFPSKMLRTGNNFEFTYNFEEVPFHSSFAPSQNLFKLANPLVDQYLYRFVSTNNTGGVQFNKNLAGRYANTYKNWFPGPMGRTQGWNLGSGVNRASVSAFATTNRMELEGASYQVPPQPNGMTNNLQGSNTYALENTMIFNSQPANPGTTATYLEGNMLITSESETQPVNRVAYNVGGQMATNNQSSTTAPATGTYNLQEIVPGSVWMERDVYLQGPIWAKIPETGAHFHPSPAMGGFGLKHPPPMMLIKNTPAPGNITSFSDVPVSSFITQYSTGQVTVEMEWELKKENSKRWNPEIQYTNNYNDPQFVDFAPDSTGEYRTTRPIGTRYLTRPL

SEQ ID NO: 870 - protein, 724 aa, Artificial Sequence
  source: /note="Description of Artificial Sequence: Synthetic polypeptide"
MSFVDHPPDWLEEVGEGLREFLGLEAGPPKPKPNQQHQDQARGLVLPGYNYLGPGNGLDRGEPVNRADEVAREHDISYNEQLEAGDNPYLKYNHADAEFQEKLADDTSFGGNLGKAVFQAKKRVLEPFGLAEEGAKTAPTGKRIDDHFPKRKKARTEEDSKPSTSSDAEAGPSGSQQLQIPAQPASSLGADTMSAGGGGPLGDNNQGADGVGNASGDWHCDSTWMGDRVVTKSTRTWVLPSYNNHQYREIKSGSVDGSNANAYFGYSTPWGYFDFNRFHSHWSPRDWQRLINNYWGFRPRSLRAKIFNIQVKEVTVQDSTTTIANNLTSTVQVFTDDDYQLPYVVGNGTEGCLPAFPPQVFTLPQYGYATLNRDNTENPTERSSFFCLEYFPSKMLRTGNNLEFTYNFEEVPFHSSFAPSQNLFKLANPLVDQYLYRFVSTNNTGGVQFNKNLAGRYANTYKNWFPGPMGRTQGWNLGSGVNRASVSAFATTNRMELEGASYQVPPQPNGMTNNLQGSNTYALENTMIFNSQPANPGTTATYLEGNMLITSESETQPVNRVVHNVGGQMATNNQSSTTAPATGTYNLQEIVPGSVWMERDVYLQGPIWAKIPETGAHFHPSPAMGGFGLKHPPPMMLIKNTPVPGNITSFSDVPVSSFITQYSTGQVTVEMEWELKKENSKRWNPEIQYTNNYNDPQFVDFAPDSTGEYRTTRPIGTRYLTRPL

SEQ ID NO: 871 - protein, 724 aa, Artificial Sequence
  source: /note="Description of Artificial Sequence: Synthetic polypeptide"
MSFVDHPPDWLEEVGEGLREFLGLEAGPPKPKPNQQHQDQARGLVLPGYNYLGPGNGLDRGEPVNRADEVAREHDISYNEQLEAGDNPYLKYNHADAEFQEKLADDTSFGGNLGKAVFQAKKRVLEPFGLVEEGAKTAPTGKRIDDHFPKRKKARTEEDSKPSTSSDAEAGPSGSQQLQIPAQPASSLGADTMSAGGGGPLGDNNQGADGVGNASGDWHCDSTWMGDRVVTKSTRTWVLPSYNNHQYREIKSGSVDGGNANAYFGYSTPWGYFDFNRFHSHWSPRDWQRLINNYWGFRPRSLRVKIFNIQVKEVTVQDSTTTIANNLTSTVQVFTDDDYQLPYVVGNGTEGCLPAFPPQVFTLPQYGYATLNRDNTENPTERSSFFCLEYFPSKMLRTGNNFEFTYNFEEVPFHSSFAPSQNLFKLANPLVDQYLYRFVSTNNTGGVQFNKNLAGRYANTYKNWFPGPMGRTQGWNLGSGVNRASVSAFATTNRMELEGASYQVPPQPNGMTNNLQGSNTYALENTMIFNSQPANPGTTATYLEGNMLITSESETQPVNRVAYNVGGQMATNNQSSTTAPATGTYNLQEIVPGSVWMERDVYLQGPIWAKIPETGAHFHPSPAMGGFGLKHPPPMMLIKNTPAPGNITSFSDVPVSSFITQYSTGQVTVEMEWELKKGNSKRWNPEIQYTNNYNDPQFVDFAPDSTGEYRTTRPIGTRYLTRPL

SEQ ID NO: 872 - protein, 724 aa, Artificial Sequence
  source: /note="Description of Artificial Sequence: Synthetic polypeptide"
MSFVDHPPDWLEEVGEGLREFLGLEAGPPKPKPNQQHQDQARGLVLPGYNYLGPGNGLDRGEPVNRADEVAREHDISYNEQLEAGDNPYLKYNHADAEFQEKLADDTSFGGNLGKAVFQAKKRVLEPFGLVEEGAKTAPTGKRIDDHFPKRKKARTEEDSKPSTSSDAEAGPSGSQQLQIPAQPASSLGADTMSAGGGGPLGDNNQGADGVGNASGDWHCDSTWMGDRVVTKSTRTWVLPSYNNHQYREIKSGSVDGSNANAYFGYSTPWGYFDFNRFHSHWSPRDWQRLINNYWGFRPRSLRVKIFNIQVKEVTVQDSTTTIANNLTSTVQVFTDDDYQLPYVVGNGTEGCLPAFPPQVFTLPQYGYATLNRDNTENPTERSSFFCLEYFPSKMLRTGNNFEFTYNFEEVPFHSSFAPSQNLFKLANPLVDQYLYRFVSTNNTGGVQFNKNLAGRYANTYKNWFPGPMGRTQGWNLGSGVNRASVSAFATTNRMELEGASYQVPPQPNGMTNNLQGSNTYALENTMIFNSQPANPGTTATYLEGNMLITSESETQPVNRVAYNVGGQMATNNQSSTTAPATGTYNLQEIVPGSVWMERDVYLQGPIWAKIPETGVHFHPSPAMGGFGLKHPPPMMLIKNTPVPGNITSFSDVPVSSFITQYSTGQVTVEMEWELKKENSKRWNPEIQYTNNYNDPQFVDFAPDSTGEYRTTRPIGTRYLTRPL

SEQ ID NO: 873 - protein, 724 aa, Artificial Sequence
  source: /note="Description of Artificial Sequence: Synthetic polypeptide"
  MOD_RES (551)..(551): Any naturally occurring amino acid
MSFVDHPPDWLEEVGEGLREFLGLEAGPPKPKPNQQHQDQARGLVLPGYNYLGPGNGLDRGEPVNRADEVAREHDISYNEQLEAGDNPYLKYNHADAEFQEKLADDTSFGGNLGKAVFQAKKRVLEPFGLVEEGAKTAPTGKRIDDHFPKRKKARTEEDSKPSTSSDAEAGPSGSQQLQIPAQPASSLGADTMSAGGGGPLGDNNQGADGVGNASGDWHCDSTWMGDRVVTKSTRTWVLPSYNNHQYREIKSGSVDGSNANAYFGYSTPWGYFDFNRFHSHWSPRDWQRLINNYWGFRPRSLRVKIFNIQVKEVTVQDSTTTIANNLTSTVQVFTDDDYQLPYVVGNGTEGCLPAFPPQVFTLPQYGYATLNRDNTENPTERSSFFCLEYFPSKMLRTGNNFEFTYNFEEVPFHSSFAPSQNLFKLANPLVDQYLYRFVSTNNTGGVQFNKNLAGRYANTYKNWFPGPMGRTQGWNLGSGVNRASVSAFATTNRMELEGASYQVPPQPNGMTNNLQGSNTYALENTMIFNSQPANPGTTATYLEGSMLITXESETQPVNRVAYNVGGQMATNNQSSTTAPATGTYNLQEIVPGSVWMERDVYLQGPIWAKIPETGAHFHPSPAMGGFGLKHPPPMMLIKNTPVPGNITSFSDVPVSSFITQYSTGQVTVEMEWELKKENSKRWNPEIQYTNNYNDPQFVDFAPDSTGEYRTTRPIGTRYLTRPL

SEQ ID NO: 874 - protein, 736 aa, Artificial Sequence; identical to SEQ ID NO: 48
  source: /note="Description of Artificial Sequence: Synthetic polypeptide"

SEQ ID NO: 875 - protein, 734 aa, Artificial Sequence; identical to SEQ ID NO: 66
  source: /note="Description of Artificial Sequence: Synthetic polypeptide"

SEQ ID NO: 876 - protein, 723 aa, Artificial Sequence
  source: /note="Description of Artificial Sequence: Synthetic polypeptide"
MSFVDHPPDWLEEVGEGLREFLGLEAGPPKPKPNQQHQDQARGLVLPGYNYLGPGNGLDRGEPVNRADEVAREHDISYNEQLEAGDNPYLKYNHADAEFQEKLADDTSFGGNLGKAVFQAKKRVLEPFGLVEEGAKTAPTGKRIDDHFPKRKKARTEEDSKPSTSSDAEAGPSGSQQLQIPAQPASSLGADTMSAGGGPLGDNNQGADGVGNASGDWHCDSTWMGDRVVTKSTRTWVLPSYNNHQYREIKSGSVDGSNANAYFGYSTPWGYFDFNRFHSHWSPRDWQRLINNYWGFRPRSLRVKIFNIQVKEVTVQDSTTTIANNLTSTVQVFTDDDYQLPYVVGNGTEGCLPAFPPQVFTLPQYGYATLNRDNTENPTERSSFFCLEYFPSKMLRTGNNFEFTYNFEEVPFHSSFAPSQNLFKLANPLVDQYLYRFVSTNNTGGVQFNKNLAGRYANTYKNWFPGPMGRTQGWNLGSGVNRASVSAFATTNRMELEGASYQVPPQPNGMTNNLQGSNTYALENTMIFNSQPANPGTTATYLEGNMLITSESETQPVNRVAYNVGGQMATNNQSSTTAPATGTYNLQEIVPGSVWMERDVYLQGPIWAKIPETGAHFHPSPAMGGFGLKHPPPMMLIKNTPVPGNITSFSDVPVSSFITQYSTGQVTVEMEWELKKENSKRWNPEIQYTNNYNDPQFVDFAPDSTGEYRTTRPIGTRYLTRPL

SEQ ID NO: 877 - protein, 534 aa, Artificial Sequence
  source: /note="Description of Artificial Sequence: Synthetic polypeptide"
MAEGGGGAMGDSSGGADGVGNASGNWHCDSQWMGNTVITKTTRTWVLPSYNNHIYKAITSGTSQDANVQYAGYSTPWGYFDFNRFHCHFSPRDWQRLINNHWGIRPKSLKFKIFNVQVKEVTTQDQTKTIANNLTSTIQVFTDDEHQLPYVLGSATEGTMPPFPSDVYALPQYGYCTMHTNQNGARFNDRSAFYCLEYFPSQMLRTGNNFEFTFDFEEVPFHSMFAHSQDLDRLMNPLVDQYLWNFNEVDSSRNAQFKKAVKGAYGTMGRNWLPGPKFLDQRVRAYTGGTDNYANWNIWSNGNKVNLKDRQYLLQPGPVSATYTEGEASSLPAQNILGIAKDPYRSGSTTAGISDIMVTEEQEVAPTNGVGWKPYGRTVTNEQNTTTAPTSSDLDVLGALPGMVWQNRDIYLQGPIGAKIPKTDGKFHPSPNLGGFGLHNPPPQVFIKNTPVPADPPVEYVHQKWNSYITQYSTGQCTVEMVWELRKENSKRWNPEIQFTSNFSNRTSIMFAPNETGGYVEDRLIGTRYLTQNL

SEQ ID NO: 878 - protein, 554 aa, Artificial Sequence
  source: /note="Description of Artificial Sequence: Synthetic polypeptide"
MTSVNSAEASTGAGGGGSNPVKSMWSEGATFSANSVTCTFSRQFLIPYDPEHHYKVFSPAASSCHNASGKEAKVCTISPIMGYSTPWRYLDFNALNLFFSPLEFQHLIENYGSIAPDALTVTISEIAVKDVTDKTGGGVQVTDSTTGRLCMLVDHEYKYPYVLGQGQDTLAPELPIWVYFPPQYAYLTVGDVNTQGISGDSKKLASEESAFYVLEHSSFQLLGTGGTATMSYKFPPVPPENLEGCSQHFYEMYNPLYGSRLGVPDTLGGDPKFRSLTHEDHAIQPQNFMPGPLVNSVSTKEGDSFNTGAGKALTGLSTGTSQNTRISLRPGPVSQPYHHWDTDKYVTGINAISHGQTTYGNAEDKEYQQGVGRFPNEKEQLKQLQGLNMHTYFPNKGTQQYTDQIERPLMVGSVWNRRALHYESQLWSKIPNLDDSFKTQFAALGGWGLHQPPPQIFLKILPQSGPIGGIKSMGITTLVQYAVGIMTVTMTFKLGPRKATGRWNPQPGVYPPHAAGHLPYVLYDPTATDAKQHHRHGYEKPEELWTAKSRVHPL

SEQ ID NO: 879 - protein, 587 aa, Artificial Sequence
  source: /note="Description of Artificial Sequence: Synthetic polypeptide"
MSDGTSQPDGGNAVHSAARVERAADGPGGSGGGGSGGGGVGVSTGSYDNQTHYRFLGDGWVEITALATRLVHLNMPKSENYCRIRVHNTTDTSVKGNMAKDDAHEQIWTPWSLVDANAWGVWLQPSDWQYICNTMSQLNLVSLDQEIFNVVLKTVTEQDSGGQAIKIYNNDLTACMMVAVDSNNILPYTPAANSMETLGFYPWKPTIASPYRYYFCVDRDLSVTYENQEGTIEHNVMGTPKGMNSQFFTIENTQQITLLRTGDEFATGTYYFDTNPVKLTHTWQTNRQLGQPPLLSTFPEADTDAGTLTAQGSRHGATQMEVNWVSEAIRTRPAQVGFCQPHNDFEASRAGPFAAPKVPADVTQGMDREANGSVRYSYGKQHGENWAAHGPAPERYTWDETNFGSGRDTRDGFIQSAPLVVPPPLNGILTNANPIGTKNDIHFSNVFNSYGPLTTFSHPSPVYPQGQIWDKELDLEHKPRLHITAPFVCKNNAPGQMLVRLGPNLTDQYDPNGATLSRIVTYGTFFWKGKLTMRAKLRANTTWNPVYQVSVEDNGNSYMSVTKWLPTATGNMQSVPLITRPVARNTY

SEQ ID NO: 880 - protein, 584 aa, Artificial Sequence
  source: /note="Description of Artificial Sequence: Synthetic polypeptide"
MSDGAVQPDGGQPAVRNERATGSGNGSGGGGGGGSGGVGISTGTFNNQTEFKFLENGWVEITANSSRLVHLNMPESENYKRVVVNNMDKTAVKGNMALDDIHVEIVTPWSLVDANAWGVWFNPGDWQLIVNTMSELHLVSFEQEIFNVVLKTVSESATQPPTKVYNNDLTASLMVALDSNNTMPFTPAAMRSETLGFYPWKPTIPTPWRYYFQWDRTLIPSHTGTSGTPTNVYHGTDPDDVQFYTIENSVPVHLLRTGDEFATGTFFFDCKPCRLTHTWQTNRALGLPPFLNSLPQSEGATNFGDIGVQQDKRRGVTQMGNTDYITEATIMRPAEVGYSAPYYSFEASTQGPFKTPIAAGRGGAQTDENQAADGDPRYAFGRQHGQKTTTTGETPERFTYIAHQDTGRYPEGDWIQNINFNLPVTNDNVLLPTDPIGGKTGINYTNIFNTYGPLTALNNVPPVYPNGQIWDKEFDTDLKPRLHINAPFVCQNNCPGQLFVKVAPNLTNQYDPDASANMSRIVTYSDFWWKGKLVFKAKLRASHTWNPIQQMSINVDNQFNYVPNNIGAMKIVYEKSQLAPRKLY

SEQ ID NO: 881 - protein, 548 aa, Artificial Sequence
  source: /note="Description of Artificial Sequence: Synthetic polypeptide"
GVGISTGTFNNQTEFKFLENGWVEITANSSRLVHLNMPESENYRRVVVNNMDKTAVNGNMALDDIHAQIVTPWSLVDANAWGVWFNPGDWQLIVNTMSELHLVSFEQEIFNVVLKTVSESATQPPTKVYNNDLTASLMVALDSNNTMPFTPAAMRSETLGFYPWKPTIPTPWRYYFQWDRTLIPSHTGTSGTPTNIYHGTDPDDVQFYTIENSVPVHLLRTGDEFATGTFFFDCKPCRLTHTWQTNRALGLPPFLNSLPQSEGATNFGDIGVQQDKRRGVTQMGNTNYITEATIMRPAEVGYSAPYYSFEASTQGPFKTPIAAGRGGAQTDENQAADGNPRYAFGRQHGQKTTTTGETPERFTYIAHQDTGRYPEGDWIQNINFNLPVTNDNVLLPTDPIGGKTGINYTNIFNTYGPLTALNNVPPVYPNGQIWDKEFDTDLKPRLHVNAPFVCQNNCPGQLFVKVAPNLTNEYDPDASANMSRIVTYSDFWWKGKLVFKAKLRASHTWNPIQQMSINVDNQFNYVPSNIGGMKIVYEKSQLAPRKLY

SEQ ID NO: 882 - protein, 736 aa, Artificial Sequence; identical to SEQ ID NO: 110
  source: /note="Description of Artificial Sequence: Synthetic polypeptide"

SEQ ID NO: 883 - protein, 736 aa, Artificial Sequence; identical to SEQ ID NO: 105
  source: /note="Description of Artificial Sequence: Synthetic polypeptide"

SEQ ID NO: 884 - protein, 736 aa, Artificial Sequence
  source: /note="Description of Artificial Sequence: Synthetic polypeptide"
MAADGYLPDWLEDTLSEGIRQWWKLKPGPPPPKPAERHKDDSRGLVLPGYKYLGPFNGLDKGEPVNEADAAALEHDKAYDRQLDSGDNPYLKYNHADAEFQERLKEDTSFGGNLGRAVFQAKKRVLEPLGLVEEPVKTAPGKKRPVEHSPVEEPDSSSGTGKAGQQPARKRLNFGQTGDADSVPDPQPLGQPPAAPSGLGTNTMATGSGAPMADNNEGADGVGNSSGNWHCDSTWMGDRVITTSTRTWALPTYNNHLYKQISSQSGASNDNHYFGYSTPWGYFDFNRFHCHFSPRDWQRLINNNWGFRPKRLNFKLFNIQVKEVTQNDGTTTIANNLTSTVQVFTDSEYQLPYVLGSAHQGCLPPFPADVFMVPQYGYLTLNNGSQAVGRSSFYCLEYFPSQMLRTGNNFTFSYTFEDVPFHSSYAHSQSLDRLMNPLIDQYLYYLSRTNTPSGTTTQSRLQFSQAGASDIRDQSRNWLPGPCYRQQRVSKTSADNNNSEYSWTGATKYHLNGRDSLVNPGPAMASHKDDEEKFFPQSGVLIFGKQGSEKTNVDIEKVMITDEEEIRTTNPVATEQYGSVSTNLQRGNRQAATADVNTQGVLPGMVWQDRDVYLQGPIWAKIPHTDGHFHPSPLMGGFGLKHPPPQILIKNTPVPANPSTTFSAAKFASFITQYSTGQVSVEIEWELQKENSKRWNPEIQYTSNYNKSVNVDFTVDTNGVYSEPRPIGTRYLTRNL

SEQ ID NO: 885 - protein, 736 aa, Artificial Sequence
  source: /note="Description of Artificial Sequence: Synthetic polypeptide"
MAADGYLPDWLEDNLSEGIREWWDLKPGAPKPKANQQKQDDGRGLVLPGYKYLGPFNGLDKGEPVNAADAAALEHDKAYDQQLKAGDNPYLRYNHADAEFQERLQEDTSFGGNLGRAVFQAKKRVLEPFGLVEEGAKTAPGKKRPVEQSPQEPDSSSGIGKTGQQPAKKRLNFGQTGDSESVPDPQPLGEPPATPAAVGPTTMASGGGAPMADNNEGADGVGNASGNWHCDSTWLGDRVITTSTRTWALPTYNNHLYKQISSASTGASNDNHYFGYSTPWGYFDFNRFHCHFSPRDWQRLINNNWGFRPKRLNFKLFNVQVKEVTTNDGVTTIANNLTSTVQVFSDSEYQLPYVLGSAHQGCLPPFPADVFMIPQYGYLTLNNGSQAVGRSSFYCLEYFPSQMLRTGNNFTFSYTFEDVPFHSSYAHSQSLDRLMNPLIDQYLYYLNRTQDQSGSAQNKDLLFSRGSPAGMSVQPKNWLPGPCYRQQRVSKTKTDNNNSNFTWTGASKYNLNGRESIINPGTAMASHKDDKNKFFPMSGVMIFGKESAGASNTALDNVMITDEEEIKATNPVATERFGTVAVNLQSSSTDPATGDVHVMGALPGMVWQDRDVYLQGPIWAKIPHTDGHFHPSPLMGGFGLKNPPPQILIKNTPVPANPPAEFSATKFASFITQYSTGQVSVEIEWELQKENSKRWNPEVQYTSNYAKSANVDFTVDNNGLYTEPRPIGTRYLTRPL

SEQ ID NO: 886 - protein, 737 aa, Artificial Sequence
  source: /note="Description of Artificial Sequence: Synthetic polypeptide"
MAADGYLPDWLEDTLSEGIRQWWKLKPGPPPPKPAERHKDDSRGLVLPGYKYLGPGNGLDKGEPVNAADAAALEHDKAYDQQLKAGDNPYLKYNHADAEFQERLKEDTSFGGNLGRAVFQAKKRVLEPLGLVEEGAKTAPGKKRPVEPSPQRSPDSSTGIGKKGQQPARKRLNFGQTGDSESVPDPQPLGEPPATPAAVGPTTMASGGGAPMADNNEGADGVGNASGNWHCDSTWLGDRVITTSTRTWALPTYNNHLYKQISSASTGASNDNHYFGYSTPWGYFDFNRFHCHFSPRDWQRLINNNWGFRPKRLNFKLFNIQVKEVTTNDGVTTIANNLTSTVQVFSDSEYQLPYVLGSAHQGCLPPFPADVFMIPQYGYLTLNNGSQAVGRSSFYCLEYFPSQMLRTGNNFTFSYTFEDVPFHSSYAHSQSLDRLMNPLIDQYLYYLNRTQNQSGSAQNKDLLFSRGSPAGMSVQPKNWLPGPCYRQQRVSKTKTDNNNSNFTWTGASKYNLNGRESIINPGTAMASHKDDKDKFFPMSGVMIFGKESAGASNTALDNVMITDEEEIKATNPVATERFGTVAVNLQSSSTDPATEDVHVMGALPGMVWQDRDVYLQGPIWAKIPHTDGHFHPSPLMGGFGLKNPPPQILIKNTPVPANPPAEFSATKFASFITQYSTGQVSVEIEWELQKENSKRWNPEVQYTSNYAKSANVDFTVDNNGLYTEPRPIGTRYLTRNL

SEQ ID NO: 887 - protein, 736 aa, Artificial Sequence
  source: /note="Description of Artificial Sequence: Synthetic polypeptide"
MAADGYLPDWLEDNLSEGIREWWDLKPGAPKPKANQQKQDDGRGLVLPGYKYLGPFNGLDKGEPVNAADAAALEHDKAYDQQLKAGDNPYLRYNHADAEFQERLQEDTSFGGNLGRAVFQAKKRVLEPFGLVEEGAKTAPGKKRPVEQSPQEPDSSSGIGKTGQQPAKKRLNFGQTGDSESVPDPQPLGEPPATPAAVGPTTMASGGGAPMADNNEGADGVGNASGNWHCDSTWLGDRVITTSTRTWALPTYNNHLYKQISSASTGASNDNHYFGYSTPWGYFDFNRFHCHFSPRDWQRLINNNWGFRPKRLNFKLFNVQVKEVTTNDGVTTIANNLTSTVQVFSDSEYQLPYVLGSAHQGCLPPFPADVFMIPQYGYLTLNNGSQAVGRSSFYCLEYFPSQMLRTGNNFTFSYTFEDVPFHSSYAHSQSLDRLMNPLIDQYLYYLNRTQDQSGSAQNKDLLFSRGSPAGMSVQPKNWLPGPCYRQQRVSKTKTDNNNSNFTWTGASKYNLNGRESIINPGTAMASHKDDKNKFFPMSGVMIFGKESAGASNTALDNVMITDEEEIKATNPVATERFGTVAVNLQSSSTDPATGDVHVMGALPGMVWQDRDVYLQGPIWAKIPHTDGHFHPSPLMGGFGLKHPPPQILIKNTPVPANPPAEFSATKFASFITQYSTGQVSVEIEWELQKENSKRWNPEVQYTSNYAKSANVDFTVDNNGLYTEPRPIGTRYLTRPL

SEQ ID NO: 888 - protein, 736 aa, Artificial Sequence
  source: /note="Description of Artificial Sequence: Synthetic polypeptide"
MAADGYLPDWLEDNLSEGIREWWDLKPGAPKPKANQQKQDDGRGLVLPGYKYLGPFNGLDKGEPVNAADAAALEHDKAYDQQLKAGDNPYLRYNHADAEFQERLQEDTSFGGNLGRAVFQAKKRVLEPFGLVEEGAKTAPGKKRPVEQSPQEPDSSSGIGKTGQQPAKKRLNFGQTGDSESVPDPQPLGEPPATPAAVGPTTMASGGGAPMADNNEGADGVGNASGNWHCDSTWLGDRVITTSTRTWALPTYNNHLYKQISSASTGASNDNHYFGYSTPWGYFDFNRFHCHFSPRDWQRLINNNWGFRPKRLNFKLFNVQVKEVTTNDGVTTIANNLTSTVQVFSDSEYQLPYVLGSAHQGCLPPFPADVFMIPQYGYLTLNNGSQAVGRSSFYCLEYFPSQMLRTGNNFTFSYTFEDVPFHSSYAHSQSLDRLMNPLIDQYLYYLNRTQDQSGSAQNKDLLFSRGSPAGMSVQPKNWLPGPCYRQQRVSKTKTDNNNSNFTWTGASKYNLNGRESIINPGTAMASHKDDKDKFFPMSGVMIFGKESAGASNTALDNVMITDEEEIKATNPVATERFGTVAVNLQSSSTDPATGDVHVMGALPGMVWQDRDVYLQGPIWAKIPHTDGHFHPSPLMGGFGLKHPPPQILIKNTPVPANPPAEFSATKFASFITQYSTGQVSVEIEWELQKENSKRWNPEVQYTSNYAKSANVDFTVDNNGLYTEPRPIGTRYLTRPL

SEQ ID NO: 889 - protein, 736 aa, Artificial Sequence
  source: /note="Description of Artificial Sequence: Synthetic polypeptide"
MAADGYLPDWLEDNLSEGIREWWDLKPGAPKPKANQQKQDDGRGLVLPGYKYLGPFNGLDKGEPVNAADAAALEHDKAYDQQLKAGDNPYLRYNHADAEFQERLQEDTSFGGNLGRAVFQAKKRVLEPFGLVEEGAKTAPGKKRPVEQSPQEPDSSSGIGKTGQQPAKKRLNFGQTGDSESVPDPQPLGEPPATPAAVGPTTMASGGGAPMADNNEGADGVGNASGNWHCDSTWLGDRVITTSTRTWALPTYNNHLYKQISSASTGASNDNHYFGYSTPWGYFDFNRFHCHFSPRDWQRLINNNWGFRPKRLNFKLFNIQVKEVTTNDGVTTIANNLTSTVQVFSDSEYQLPYVLGSAHQGCLPPFPADVFMIPQYGYLTLNNGSQAVGRSSFYCLEYFPSQMLRTGNNFTFSYTFEDVPFHSSYAHSQSLDRLMNPLIDQYLYYLNRTQDQSGSAQNKDLLFSRGSPAGMSVQPKNWLPGPCYRQQRVSKTKTDNNNSNFTWTGASKYNLNGRESIINPGTAMASHKDDKNKFFPMSGVMIFGKESAGASNTALDNVMITDEEEIKATNPVATERFGTVAVNLQSSSTDPATGDVHVMGALPGMVWQDRDVYLQGPIWAKIPHTDGHFHPSPLMGGFGLKHPPPQILIKNTPVPANPPAEFSATKFASFITQYSTGQVSVEIEWELQKENSKRWNPEVQYTSNYAKSANVDFTVDNNGLYTEPRPIGTRYLTRPL

SEQ ID NO: 890 - protein, 736 aa, Artificial Sequence
  source: /note="Description of Artificial Sequence: Synthetic polypeptide"
MAADGYLPDWLEDNLSEGIREWWDLKPGAPKPKANQQKQDDGRGLVLPGYKYLGPFNGLDKGEPVNAADAAALEHDKAYDQQLKAGDNPYLRYNHADAEFQERLQEDTSFGGNLGRAVFQAKKRVLEPFGLVEEGAKTAPGKKRPVEQSPQEPDSSSGIGKTGQQPAKKRLNFGQTGDSESVPDPQPLGEPPATPAAVGPTTMASGGGAPMADNNEGADGVGNASGNWHCDSTWLGDRVITTSTRTWALPTYNNHLYKQISSASTGASNDNHYFGYSTPWGYFDFNRFHCHFSPRDWQRLINNNWGFRPKRLNFKLFNVQVKEVTTNDGVTTIANNLTSTVQVFSDSEYQLPYVLGSAHQGCLPPFPADVFMIPQYGYLTLNNGSQAVGRSSFYCLEYFPSQMLRTGNNFTFSYTFEDVPFHSSYAHSQSLDRLMNPLIDQYLYYLNRTQNQSGSAQNKDLLFSRGSPAGMSVQPKNWLPGPCYRQQRVSKTKTDNNNSNFTWTGASKYNLNGRESIINPGTAMASHKDDKDKFFPMSGVMIFGKESAGASNTALDNVMITDEEEIKATNPVATERFGTVAVNLQSSSTDPATGDVHVMGALPGMVWQDRDVYLQGPIWAKIPHTDGHFHPSPLMGGFGLKHPPPQILIKNTPVPANPPAEFSATKFASFITQYSTGQVSVEIEWELQKENSKRWNPEVQYTSNYAKSANVDFTVDNNGLYTEPRPIGTRYLTRPL

SEQ ID NO: 891 - protein, 736 aa, Artificial Sequence
  source: /note="Description of Artificial Sequence: Synthetic polypeptide"
MAADGYLPDWLEDNLSEGIREWWDLKPGAPKPKANQQKQDDGRGLVLPGYKYLGPFNGLDKGEPVNAADAAALEHDKAYDQQLKAGDNPYLRYNHADAEFQERLQEDTSFGGNLGRAVFQAKKRVLEPFGLVEEGAKTAPGKKRPVEQSPQEPDSSSGIGKTGQQPAKKRLNFGQTGDSESVPDPQPLGEPPATPAAVGPTTMASGGGAPMADNNEGADGVGNASGNWHCDSTWLGDRVITTSTRTWALPTYNNHLYKQISSASTGASNDNHYFGYSTPWGYFDFNRFHCHFSPRDWQRLINNNWGFRPKRLNFKLFNVQVKEVTTNDGVTTIANNLTSTVQVFSDSEYQLPYVLGSAHQGCLPPFPADVFMIPQYGYLTLNNGSQAVGRSSFYCLEYFPSQMLRTGNNFTFSYTFEDVPFHSSYAHSQSLDRLMNPLIDQYLYYLNRTQNQSGSAQNKDLLFSRGSPAGMSVQPKNWLPGPCYRQQRVSKTKTDNNNSNFTWTGASKYNLNGRESIINPGTAMASHKDDKNKFFPMSGVMIFGKESAGASNTALDNVMITDEEEIKATNPVATERFGTVAVNLQSSSTDPATGDVHVMGALPGMVWQDRDVYLQGPIWAKIPHTDGHFHPSPLMGGFGLKHPPPQILIKNTPVPANPPAEFSATKFASFITQYSTGQVSVEIEWELQKENSKRWNPEVQYTSNYAKSANVDFTVDNNGLYTEPRPIGTRYLTRPL

SEQ ID NO: 892 - DNA, 2217 bp, Artificial Sequence
  source: /note="Description of Artificial Sequence: Synthetic polynucleotide"
atggctgccgatggttatcttccagattggctcgaggacaacctctctgagggcattcgcgagtggtgggacctgaaacctggagccccgaaacccaaagccaaccagcaaaagcaggacaacggccggggtctggtgcttcctggctacaagtacctcggacccttcaacggactcgacaagggggagcccgtcaacgcggcggacgcagcggccctcgagcacgacaaggcctacgaccagcagctccaagcgggtgacaatccgtacctgcggtataatcacgccgacgccgagtttcaggagcgtctgcaagaagatacgtcttttgggggcaacctcgggcgcgcagtcttccaggccaaaaagcgggttctcgaacctctgggcctggttgaatcgccggttaagacggctcctggaaagaagagaccggtagagccatcaccccagcgctctccagactcctctacgggcatcggcaagaaaggccagcagcccgcaaaaaagagactcaattttgggcagactggcgactcagagtcagtccccgaccctcaaccaatcggagaaccaccagcaggcccctctggtctgggatctggtacaatggctgcaggcggtggcgctccaatggcagacaataacgaaggcgccgacggagtgggtagttcctcaggaaattggcattgcgattccacatggctgggcgacagagtcatcaccaccagcacccgcacctgggccctgcccacctacaacaaccacctctacaagcaaatctccaacgggacctcgggaggaagcaccaacgacaacacctacttcggctacagcaccccctgggggtattttgacttcaacagattccactgccacttttcaccacgtgactggcagcgactcatcaacaacaactggggattccggcccaagaggctcaacttcaagctcttcaacatccaagtcaaggaggtcacgcagaatgaaggcaccaagaccatcgccaataaccttaccagcacgattcaggtctttacggactcggaataccagctcccgtacgtgctcggctcggcgcaccagggctgcctgcctccgttcccggcggacgtcttcatgattcctcagtacgggtacctgactctgaacaatggcagtcaggctgtgggccggtcgtccttctactgcctggagtactttccttctcaaatgctgagaacgggcaacaactttgaattcagctacaacttcgaggacgtgcccttccacagcagctacgcgcacagccagagcctggaccggctgatgaaccctctcatcgaccagtacttgtactacctgtcccggactcaaagcacgggcggtactgcaggaactcagcagttgctattttctcaggccgggcctaacaacatgtcggctcaggccaagaactggctacccggtccctgctaccggcagcaacgcgtctccacgacactgtcgcagaacaacaacagcaactttgcctggacgggtgccaccaagtatcatctgaatggcagagactctctggtgaatcctggcgttgccatggctacccacaaggacgacgaagagcgattttttccatccagcggagtcttaatgtttgggaaacagggagctggaaaagacaacgtggactatagcagcgtgatgctaaccagcgaggaagaaataaagaccaccaacccagtggccacagaacagtacggcgtggtggccgataacctgcaacagcaaaacgccgctcctattgtaggggccgtcaatagtcaaggagccttacctggcatggtgtggcagaaccgggacgtgtacctgcagggtcccatctgggccaagattcctcatacggacggcaactttcatccctcgccgctgatgggaggctttggactgaagcatccgcctcctcagatcctgattaaaaacacacctgttcccgcggatcctccgaccaccttcaatcaggccaagctggcttctttcatcacgcagtacagtaccggccaggtcagcgtggagatcgagtgggagctgcagaaggagaacagcaaacgctggaacccagagattcagtacacttccaactactacaaatctacaaatgtggactttgctgtcaatactgagggtacttattccgagcctcgccccattggcacccgttacctcacccgtaatctgtaa

SEQ ID NO: 893 - protein, 738 aa, Artificial Sequence
  source: /note="Description of Artificial Sequence: Synthetic polypeptide"
MAADGYLPDWLEDNLSEGIREWWDLKPGAPKPKANQQKQDNGRGLVLPGYKYLGPFNGLDKGEPVNAADAAALEHDKAYDQQLQAGDNPYLRYNHADAEFQERLQEDTSFGGNLGRAVFQAKKRVLEPLGLVESPVKTAPGKKRPVEPSPQRSPDSSTGIGKKGQQPAKKRLNFGQTGDSESVPDPQPIGEPPAGPSGLGSGTMAAGGGAPMADNNEGADGVGSSSGNWHCDSTWLGDRVITTSTRTWALPTYNNHLYKQISNGTSGGSTNDNTYFGYSTPWGYFDFNRFHCHFSPRDWQRLINNNWGFRPKRLNFKLFNIQVKEVTQNEGTKTIANNLTSTIQVFTDSEYQLPYVLGSAHQGCLPPFPADVFMIPQYGYLTLNNGSQAVGRSSFYCLEYFPSQMLRTGNNFEFSYNFEDVPFHSSYAHSQSLDRLMNPLIDQYLYYLSRTQSTGGTAGTQQLLFSQAGPNNMSAQAKNWLPGPCYRQQRVSTTLSQNNNSNFAWTGATKYHLNGRDSLVNPGVAMATHKDDEERFFPSSGVLMFGKQGAGKDNVDYSSVMLTSEEEIKTTNPVATEQYGVVADNLQQQNAAPIVGAVNSQGALPGMVWQNRDVYLQGPIWAKIPHTDGNFHPSPLMGGFGLKHPPPQILIKNTPVPADPPTTFNQAKLASFITQYSTGQVSVEIEWELQKENSKRWNPEIQYTSNYYKSTNVDFAVNTEGTYSEPRPIGTRYLTRNL

SEQ ID NO: 894 - protein, 738 aa, Artificial Sequence; identical to SEQ ID NO: 893
  source: /note="Description of Artificial Sequence: Synthetic polypeptide"

SEQ ID NO: 895 - DNA, 4472 bp, Artificial Sequence
  source: /note="Description of Artificial Sequence: Synthetic polynucleotide"
ctccatcactaggggtaaccgcgaagcgcctcccacgctgccgcgtcagcgctgacgtaaattacgtcataggggagtggtcctgtattagctgtcacgtgagtgcttttgcgacattttgcgacaccacgtggccattcatggtatatatggccgagtgagcgagcaggatctccattttgaccgcgaaatttgaacgagcagcagccatgccgggcttctacgagatcgtgcttaaggtgccgagcgacctggacgagcacctgccgggcatttctgactcgtttgtgaactgggtggcagagaaggaatgggagctgcccccggattctgacatggatcggaatctgattgagcaggcacccctgaccgtggccgagaagctacagcgcgacttcctggtccaatggcgccgcgtgagtaaggccccggaggccctcttctttgttcagttcgagaagggcgagtcctacttccacctccatattctggtagagaccacgggggtcaaatccatggtgctgggccgcttcctgagtcagattcgggacaagctggtgcagaccatctaccgcgggatcgagccgaccctgcccaactggttcgcggtgacaaagacgcgtaatggcgccggaggggggaacaaggtggtggacgagtgctacatccccaactacctgctgcccaagactcagcccgagctgcagtgggcgtggactaacatggaggagtatataagcgcgtgcttgaacctggccgagcgcaaacggctcgtggcgcagcacctgacccacgtcagccagacccaggagcagaacaaggagaatctgaacccgaattctgacgcgcctgtcatccggtcaaaaacctccgcgcgctacatggagctggtcgggtggctggtggaccggggcatcacctccgagaagcagtggatccaggaggaccaggcctcgtacatctccttcaacgccgcctccaactcgcggtctcagatcaaggccgcgctggacaatgccggcaagatcatggcgctgaccaaatccgcgcccgactacctggtaggccccgctctgcccgcggacattaaatccaaccgcatctaccgcatcctggagctgaatggctacgaccctgcctacgccggttccgtctttctcggctgggcccagaaaaagtttggcaaaaggaacaccatctggctgtttgggccggccaccacgggcaagaccaacatcgcggaagccatcgcccacgccgtgcccttctacggctgcgtcaactggaccaatgagaactttcccttcaacgattgcgtcgacaagatggtgatctggtgggaggagggcaagatgacggccaaggtcgtggagtccgccaaggccattctcggcggcagcaaggtgcgcgtggaccaaaagtgcaagtcgtccgcccagatcgatcccacccccgtgatcgtcacctccaacaccaacatgtgcgccgtgattgacgggaacagcaccaccttcgagcaccagcagccgttgcaggaccggatgttcaaatttgaacttacccgccgtctggagcacgactttggcaaggtgacaaagcaggaagtcaaagagttcttccgctgggcgcaggatcacgtgaccgaggtggcgcatgagttctacgtcagaaagggtggagctaacaaaagacccgcccccgatgacgcggatataagcgagcccaagcgggcctgcccctcagtcgcggatccatcgacgtcagacgcggaaggagctccggtggactttgccgacaggtaccaaaacaaatgttctcgtcacgcgggcatgcttcagatgctgtttccctgcaaaacatgcgagagaatgaatcagaatttcaacatttgcttcacgcacgggaccagagactgttcagaatgtttccctggcgtgtcagaatctcaaccggtcgtcagaaaaaagacgtatcggaaactctgtgcgattcatcatctgctggggcgggcacccgagattgcttgctcggcctgcgacctggtcaacgtggacctggatgactgtgtttctgagcaataaatgacttaaaccaggtatggctgccgatggttatcttccagattggctcgaggacaacctctctgagggcattcgcgagtggtgggacctgaaacctggagccccgaaacccaaagccaaccagcaaaagcaggacaacggccggggtctggtgcttcctggctacaagtacctcggacccttcaacggactcgacaagggggagcccgtcaacgcggcggacgcagcggccctcgagcacgacaaggcctacgaccagcagctccaagcgggtgacaatccgtacctgcggtataatcacgccgacgccgagtttcaggagcgtctgcaagaagatacgtcttttgggggcaacctcgggcgcgcagtcttccaggccaaaaagcgggttctcgaacctctgggcctggttgaatcgccggttaagacggctcctggaaagaagagaccggtagagccatcaccccagcgctctccagactcctctacgggcatcggcaagaaaggccagcagcccgcaaaaaagagactcaattttgggcagactggcgactcagagtcagtccccgaccctcaaccaatcggagaaccaccagcaggcccctctggtctgggatctggtacaatggctgcaggcggtggcgctccaatggcagacaataacgaaggcgccgacggagtgggtagttcctcaggaaattggcattgcgattccacatggctgggcgacagagtcatcaccaccagcacccgcacctgggccctgcccacctacaacaaccacctctacaagcaaatctccaacgggacctcgggaggaagcaccaacgacaacacctacttcggctacagcaccccctgggggtattttgacttcaacagattccactgccacttttcaccacgtgactggcagcgactcatcaacaacaactggggattccggcccaagaggctcaacttcaagctcttcaacatccaagtcaaggaggtcacgcagaatgaaggcaccaagaccatcgccaataaccttaccagcacgattcaggtctttacggactcggaataccagctcccgtacgtgctcggctcggcgcaccagggctgcctgcctccgttcccggcggacgtcttcatgattcctcagtacgggtacctgactctgaacaatggcagtcaggctgtgggccggtcgtccttctactgcctggagtactttccttctcaaatgctgagaacgggcaacaactttgaattcagctacaacttcgaggacgtgcccttccacagcagctacgcgcacagccagagcctggaccggctgatgaaccctctcatcgaccagtacttgtactacctgtcccggactcaaagcacgggcggtactgcaggaactcagcagttgctattttctcaggccgggcctaacaacatgtcggctcaggccaagaactggctacccggtccctgctaccggcagcaacgcgtctccacgacactgtcgcagaacaacaacagcaactttgcctggacgggtgccaccaagtatcatctgaatggcagagactctctggtgaatcctggcgttgccatggctacccacaaggacgacgaagagcgattttttccatccagcggagtcttaatgtttgggaaacagggagctggaaaagacaacgtggactatagcagcgtgatgctaaccagcgaggaagaaataaagaccaccaacccagtggccacagaacagtacggcgtggtggccgataacctgcaacagcaaaacgccgctcctattgtaggggccgtcaatagtcaaggagccttacctggcatggtgtggcagaaccgggacgtgtacctgcagggtcccatctgggccaagattcctcatacggacggcaactttcatccctcgccgctgatgggaggctttggactgaagcatccgcctcctcagatcctgattaaaaacacacctgttcccgcggatcctccgaccaccttcaatcaggccaagctggcttctttcatcacgcagtacagtaccggccaggtcagcgtggagatcgagtgggagctgcagaaggagaacagcaaacgctggaacccagagattcagtacacttccaactactacaaatctacaaatgtggactttgctgtcaatactgagggtacttattccgagcctcgccccattggcacccgttacctcacccgtaatctgtaattacatgttaatcaataaaccggttaattcgtttcagttgaactttggtctcctgtccttcttatcttatcggttaccatagaaactggttacttattaactgcttggtgcgcttcgcgataaaagacttacgtcatcgggttacccctagtgatgga

SEQ ID NO: 896 - protein, 738 aa, Artificial Sequence
  source: /note="Description of Artificial Sequence: Synthetic polypeptide"
MAADGYLPDWLEDNLSEGIREWWDLKPGAPKPKANQQKQDNGRGLVLPGYKYLGPFNGLDKGEPVNAADAAALEHDKAYDQQLQAGDNPYLRYNHADAEFQERLQEDTSFGGNLGRAVFQAKKRVLEPLGLVESPVKTAPGKKRPVEPSPQRSPDSSTGIGKKGQQPAKKRLNFGQTGDSESVPDPQPIGEPPAAPSGVGPNTMAAGGGAPMADNNEGADGVGSSSGNWHCDSTWLGDRVITTSTRTWALPTYNNHLYKQISNGTSGGSTNDNTYFGYSTPWGYFDFNRFHCHFSPRDWQRLINNNWGFRPKRLNFKLFNIQVKEVTQNEGTKTIANNLTSTIQVFTDSEYQLPYVLGSAHQGCLPPFPADVFMIPQYGYLTLNNGSQAVGRSSFYCLEYFPSQMLRTGNNFEFSYNFEDVPFHSSYAHSQSLDRLMNPLIDQYLYYLSRTQSTGGTAGTQQLLFSQAGPNNMSAQAKNWLPGPCYRQQRVSTTLSQNNNSNFAWTGATKYHLNGRDSLVNPGVAMATHKDDEERFFPSSGVLMFGKQGAGKDNVDYSSVMLTSEEEIKTTNPVATEQYGVVADNLQQQNAAPIVGAVNSQGALPGMVWQNRDVYLQGPIWAKIPHTDGNFHPSPLMGGFGLKHPPPQILIKNTPVPADPPTTFNQAKLASFITQYSTGQVSVEIEWELQKENSKRWNPEIQYTSNYYKSTNVDFAVNTEGTYSEPRPIGTRYLTRNL

SEQ ID NO: 897 - protein, 738 aa, Artificial Sequence
  source: /note="Description of Artificial Sequence: Synthetic polypeptide"
MAADGYLPDWLEDNLSEGIREWWDLKPGAPKPKANQQRQDNGRGLVLPGYRYLGPFNGLDKGEPVNAADAAALEHDRAYDQQLQAGDNPYLRYNHADAEFQERLQEDTSFGGNLGRAVFQAKKRVLEPLGLVESPVRTAPGKKRPVEPSPQRSPDSSTGIGKKGQQPARKRLNFGQTGDSESVPDPQPIGEPPAAPSGVGPNTMAAGGGAPMADNNEGADGVGSSSGNWHCDSTWLGDRVITTSTRTWALPTYNNHLYRQISNGTSGGSTNDNTYFGYSTPWGYFDFNRFHCHFSPRDWQRLINNNWGFRPKRLNFKLFNIQVKEVTQNEGTRTIANNLTSTIQVFTDSEYQLPYVLGSAHQGCLPPFPADVFMIPQYGYLTLNNGSQAVGRSSFYCLEYFPSQMLRTGNNFEFSYNFEDVPFHSSYAHSQSLDRLMNPLIDQYLYYLSRTQSTGGTAGTQQLLFSQAGPNNMSAQAKNWLPGPCYRQQRVSTTLSQNNNSNFAWTGATKYHLNGRDSLVNPGVAMATHRDDEERFFPSSGVLMFGRQGAGRDNVDYSSVMLTSEEEIRTTNPVATEQYGVVADNLQQQNAAPIVGAVNSQGALPGMVWQNRDVYLQGPIWAKIPHTDGNFHPSPLMGGFGLKHPPPQILIKNTPVPADPPTTFNQAKLASFITQYSTGQVSVEIEWELQKENSKRWNPEIQYTSNYYKSTNVDFAVNTEGTYSEPRPIGTRYLTRNL

SEQ ID NO: 898 - protein, 738 aa, Artificial Sequence
  source: /note="Description of Artificial Sequence: Synthetic polypeptide"
MAADGYLPDWLEDNLSEGIREWWDLKPGAPKPKANQQRQDNGRGLVLPGYRYLGPFNGLDKGEPVNAADAAALEHDRAYDQQLQAGDNPYLRYNHADAEFQERLQEDTSFGGNLGRAVFQAKKRVLEPLGLVESPVRTAPGKKRPVEPSPQRSPDSSTGIGKRGQQPARKRLNFGQTGDSESVPDPQPIGEPPAAPSGVGPNTMAAGGGAPMADNNEGADGVGSSSGNWHCDSTWLGDRVITTSTRTWALPTYNNHLYRQISNGTSGGSTNDNTYFGYSTPWGYFDFNRFHCHFSPRDWQRLINNNWGFRPKRLNFKLFNIQVKEVTQNEGTRTIANNLTSTIQVFTDSEYQLPYVLGSAHQGCLPPFPADVFMIPQYGYLTLNNGSQAVGRSSFYCLEYFPSQMLRTGNNFEFSYNFEDVPFHSSYAHSQSLDRLMNPLIDQYLYYLSRTQSTGGTAGTQQLLFSQAGPNNMSAQAKNWLPGPCYRQQRVSTTLSQNNNSNFAWTGATKYHLNGRDSLVNPGVAMATHRDDEERFFPSSGVLMFGKQGAGRDNVDYSSVMLTSEEEIRTTNPVATEQYGVVADNLQQQNAAPIVGAVNSQGALPGMVWQNRDVYLQGPIWAKIPHTDGNFHPSPLMGGFGLKHPPPQILIKNTPVPADPPTTFNQAKLASFITQYSTGQVSVEIEWELQKENSKRWNPEIQYTSNYYKSTNVDFAVNTEGTYSEPRPIGTRYLTRNL

SEQ ID NO: 899 - protein, 738 aa, Artificial Sequence
  source: /note="Description of Artificial Sequence: Synthetic polypeptide"
MAADGYLPDWLEDNLSEGIREWWDLKPGAPKPKANQQRQDNGRGLVLPGYRYLGPFNGLDKGEPVNAADAAALEHDRAYDQQLQAGDNPYLRYNHADAEFQERLQEDTSFGGNLGRAVFQAKKRVLEPLGLVESPVRTAPGKKRPVEPSPQRSPDSSTGIGKRGQQPAKKRLNFGQTGDSESVPDPQPIGEPPAAPSGVGPNTMAAGGGAPMADNNEGADGVGSSSGNWHCDSTWLGDRVITTSTRTWALPTYNNHLYRQISNGTSGGSTNDNTYFGYSTPWGYFDFNRFHCHFSPRDWQRLINNNWGFRPKRLNFKLFNIQVKEVTQNEGTRTIANNLTSTIQVFTDSEYQLPYVLGSAHQGCLPPFPADVFMIPQYGYLTLNNGSQAVGRSSFYCLEYFPSQMLRTGNNFEFSYNFEDVPFHSSYAHSQSLDRLMNPLIDQYLYYLSRTQSTGGTAGTQQLLFSQAGPNNMSAQAKNWLPGPCYRQQRVSTTLSQNNNSNFAWTGATKYHLNGRDSLVNPGVAMATHRDDEERFFPSSGVLMFGRQGAGRDNVDYSSVMLTSEEEIRTTNPVATEQYGVVADNLQQQNAAPIVGAVNSQGALPGMVWQNRDVYLQGPIWAKIPHTDGNFHPSPLMGGFGLKHPPPQILIKNTPVPADPPTTFNQAKLASFITQYSTGQVSVEIEWELQKENSKRWNPEIQYTSNYYKSTNVDFAVNTEGTYSEPRPIGTRYLTRNL

SEQ ID NO: 900 - protein, 738 aa, Artificial Sequence
  source: /note="Description of Artificial Sequence: Synthetic polypeptide"
MAADGYLPDWLEDNLSEGIREWWDLKPGAPKPKANQQRQDNGRGLVLPGYRYLGPFNGLDKGEPVNAADAAALEHDRAYDQQLQAGDNPYLRYNHADAEFQERLQEDTSFGGNLGRAVFQAKKRVLEPLGLVESPVRTAPGKKRPVEPSPQRSPDSSTGIGKRGQQPAKKRLNFGQTGDSESVPDPQPIGEPPAAPSGVGPNTMAAGGGAPMADNNEGADGVGSSSGNWHCDSTWLGDRVITTSTRTWALPTYNNHLYRQISNGTSGGSTNDNTYFGYSTPWGYFDFNRFHCHFSPRDWQRLINNNWGFRPKRLNFKLFNIQVKEVTQNEGTRTIANNLTSTIQVFTDSEYQLPYVLGSAHQGCLPPFPADVFMIPQYGYLTLNNGSQAVGRSSFYCLEYFPSQMLRTGNNFEFSYNFEDVPFHSSYAHSQSLDRLMNPLIDQYLYYLSRTQSTGGTAGTQQLLFSQAGPNNMSAQAKNWLPGPCYRQQRVSTTLSQNNNSNFAWTGATKYHLNGRDSLVNPGVAMATHRDDEERFFPSSGVLMFGKQGAGRDNVDYSSVMLTSEEEIRTTNPVATEQYGVVADNLQQQNAAPIVGAVNSQGALPGMVWQNRDVYLQGPIWAKIPHTDGNFHPSPLMGGFGLKHPPPQILIKNTPVPADPPTTFNQARLASFITQYSTGQVSVEIEWELQKENSKRWNPEIQYTSNYYKSTNVDFAVNTEGTYSEPRPIGTRYLTRNL

SEQ ID NO: 901 - protein, 738 aa, Artificial Sequence
  source: /note="Description of Artificial Sequence: Synthetic polypeptide"
MAADGYLPDWLEDNLSEGIREWWDLKPGAPKPKANQQRQDNGRGLVLPGYRYLGPFNGLDKGEPVNAADAAALEHDRAYDQQLQAGDNPYLRYNHADAEFQERLQEDTSFGGNLGRAVFQAKKRVLEPLGLVESPVRTAPGKKRPVEPSPQRSPDSSTGIGKKGQQPAKKRLNFGQTGDSESVPDPQPIGEPPAAPSGVGPNTMAAGGGAPMADNNEGADGVGSSSGNWHCDSTWLGDRVITTSTRTWALPTYNNHLYRQISNGTSGGSTNDNTYFGYSTPWGYFDFNRFHCHFSPRDWQRLINNNWGFRPKRLNFKLFNIQVKEVTQNEGTRTIANNLTSTIQVFTDSEYQLPYVLGSAHQGCLPPFPADVFMIPQYGYLTLNNGSQAVGRSSFYCLEYFPSQMLRTGNNFEFSYNFEDVPFHSSYAHSQSLDRLMNPLIDQYLYYLSRTQSTGGTAGTQQLLFSQAGPNNMSAQAKNWLPGPCYRQQRVSTTLSQNNNSNFAWTGATKYHLNGRDSLVNPGVAMATHRDDEERFFPSSGVLMFGRQGAGRDNVDYSSVMLTSEEEIRTTNPVATEQYGVVADNLQQQNAAPIVGAVNSQGALPGMVWQNRDVYLQGPIWAKIPHTDGNFHPSPLMGGFGLKHPPPQILIKNTPVPADPPTTFNQARLASFITQYSTGQVSVEIEWELQKENSKRWNPEIQYTSNYYKSTNVDFAVNTEGTYSEPRPIGTRYLTRNL

SEQ ID NO: 902 - DNA, 2214 bp, Artificial Sequence
  source: /note="Description of Artificial Sequence: Synthetic polynucleotide"
atggctgccgatggttatcttccagattggctcgaggacaacctctctgagggcattcgcgagtggtgggacctgaaacctggagccccgaaacccaaagccaaccagcaaaagcaggacaacggccggggtctggtgcttcctggctacaagtacctcggacccttcaacggactcgacaagggggagcccgtcaacgcggcggacgcagcggccctcgagcacgacaaggcctacgaccagcagctccaagcgggtgacaatccgtacctgcggtataatcacgccgacgccgagtttcaggagcgtctgcaagaagatacgtcttttgggggcaacctcgggcgcgcagtcttccaggccaaaaagcgggttctcgaacctctgggcctggttgaatcgccggttaagacggctcctggaaagaagagaccggtagagccatcaccccagcgctctccagactcctctacgggcatcggcaagaaaggccagcagcccgcaaaaaagagactcaattttgggcagactggcgactcagagtcagtccccgaccctcaaccaatcggagaaccaccagcagccccctctggtgtgggacctaatacaatggctgcaggcggtggcgctccaatggcagacaataacgaaggcgccgacggagtgggtagttcctcaggaaattggcattgcgattccacatggctgggcgacagagtcatcaccaccagcacccgcacctgggccctgcccacctacaacaaccacctctacaagcaaatctccaacgggacctcgggaggaagcaccaacgacaacacctacttcggctacagcaccccctgggggtattttgacttcaacagattccactgccacttttcaccacgtgactggcagcgactcatcaacaacaactggggattccggcccaagaggctcaacttcaagctcttcaacatccaagtcaaggaggtcacgcagaatgaaggcaccaagaccatcgccaataaccttaccagcacgattcaggtctttacggactcggaataccagctcccgtacgtgctcggctcggcgcaccagggctgcctgcctccgttcccggcggacgtcttcatgattcctcagtacgggtacctgactctgaacaatggcagtcaggctgtgggccggtcgtccttctactgcctggagtactttccttctcaaatgctgagaacgggcaacaactttgaattcagctacaacttcgaggacgtgcccttccacagcagctacgcgcacagccagagcctggaccggctgatgaaccctctcatcgaccagtacttgtactacctgtcccggactcaaagcacgggcggtactgcaggaactcagcagttgctattttctcaggccgggcctaacaacatgtcggctcaggccaagaactggctacccggtccctgctaccggcagcaacgcgtctccacgacactgtcgcagaacaacaacagcaactttgcctggacgggtgccaccaagtatcatctgaatggcagagactctctggtgaatcctggcgttgccatggctacccacaaggacgacgaagagcgattttttccatccagcggagtcttaatgtttgggaaacagggagctggaaaagacaacgtggactatagcagcgtgatgctaaccagcgaggaagaaataaagaccaccaacccagtggccacagaacagtacggcgtggtggccgataacctgcaacagcaaaacgccgctcctattgtaggggccgtcaatagtcaaggagccttacctggcatggtgtggcagaaccgggacgtgtacctgcagggtcccatctgggccaagattcctcatacggacggcaactttcatccctcgccgctgatgggaggctttggactgaagcatccgcctcctcagatcctgattaaaaacacacctgttcccgcggatcctccgaccaccttcaatcaggccaagctggcttctttcatcacgcagtacagtaccggccaggtcagcgtggagatcgagtgggagctgcagaaggagaacagcaaacgctggaacccagagattcagtacacttccaactactacaaatctacaaatgtggactttgctgtcaatactgagggtacttattccgagcctcgccccattggcacccgttacctcacccgtaatctg

SEQ ID NO: 903 - DNA, 2217 bp, Artificial Sequence
  source: /note="Description of Artificial Sequence: Synthetic polynucleotide"
atggctgccgatggttatcttccagattggctcgaggacaacctctctgagggcattcgcgagtggtgggacctgaaacctggagccccgaaacccaaagccaaccagcaaaggcaggacaacggccggggtctggtgcttcctggctacaggtacctcggacccttcaacggactcgacaagggggagcccgtcaacgcggcggacgcagcggccctcgagcacgacagggcctacgaccagcagctccaagcgggtgacaatccgtacctgcggtataatcacgccgacgccgagtttcaggagcgtctgcaagaagatacgtcttttgggggcaacctcgggcgcgcagtcttccaggccaaaaagcgggttctcgaacctctgggcctggttgaatcgccggttaggacggctcctggaaagaagagaccggtagagccatcaccccagcgctctccagactcctctacgggcatcggcaagaaaggccagcagcccgcaagaaagagactcaattttgggcagactggcgactcagagtcagtccccgaccctcaaccaatcggagaaccaccagcagccccctctggtgtgggacctaatacaatggctgcaggcggtggcgctccaatggcagacaataacgaaggcgccgacggagtgggtagttcctcaggaaattggcattgcgattccacatggctgggcgacagagtcatcaccaccagcacccgcacctgggccctgcccacctacaacaaccacctctacaggcaaatctccaacgggacctcgggaggaagcaccaacgacaacacctacttcggctacagcaccccctgggggtattttgacttcaacagattccactgccacttttcaccacgtgactggcagcgactcatcaacaacaactggggattccggcccaagaggctcaacttcaagctcttcaacatccaagtcaaggaggtcacgcagaatgaaggcaccaggaccatcgccaataaccttaccagcacgattcaggtctttacggactcggaataccagctcccgtacgtgctcggctcggcgcaccagggctgcctgcctccgttcccggcggacgtcttcatgattcctcagtacgggtacctgactctgaacaatggcagtcaggctgtgggccggtcgtccttctactgcctggagtactttccttctcaaatgctgagaacgggcaacaactttgaattcagctacaacttcgaggacgtgcccttccacagcagctacgcgcacagccagagcctggaccggctgatgaaccctctcatcgaccagtacttgtactacctgtcccggactcaaagcacgggcggtactgcaggaactcagcagttgctattttctcaggccgggcctaacaacatgtcggctcaggccaagaactggctacccggtccctgctaccggcagcaacgcgtctccacgacactgtcgcagaacaacaacagcaactttgcctggacgggtgccaccaagtatcatctgaatggcagagactctctggtgaatcctggcgttgccatggctacccacagggacgacgaagagcgattttttccatccagcggagtcttaatgtttgggagacagggagctggaagagacaacgtggactatagcagcgtgatgctaaccagcgaggaagaaataaggaccaccaacccagtggccacagaacagtacggcgtggtggccgataacctgcaacagcaaaacgccgctcctattgtaggggccgtcaatagtcaaggagccttacctggcatggtgtggcagaaccgggacgtgtacctgcagggtcccatctgggccaagattcctcatacggacggcaactttcatccctcgccgctgatgggaggctttggactgaagcatccgcctcctcagatcctgattaaaaacacacctgttcccgcggatcctccgaccaccttcaatcaggccaagctggcttctttcatcacgcagtacagtaccggccaggtcagcgtggagatcgagtgggagctgcagaaggagaacagcaaacgctggaacccagagattcagtacacttccaactactacaaatctacaaatgtggactttgctgtcaatactgagggtacttattccgagcctcgccccattggcacccgttacctcacccgtaatctgtaa

SEQ ID NO: 904 - DNA, 2217 bp, Artificial Sequence
  source: /note="Description of Artificial Sequence: Synthetic polynucleotide"
atggctgccgatggttatcttccagattggctcgaggacaacctctctgagggcattcgcgagtggtgggacctgaaacctggagccccgaaacccaaagccaaccagcaaaggcaggacaacggccggggtctggtgcttcctggctacaggtacctcggacccttcaacggactcgacaagggggagcccgtcaacgcggcggacgcagcggccctcgagcacgacagggcctacgaccagcagctccaagcgggtgacaatccgtacctgcggtataatcacgccgacgccgagtttcaggagcgtctgcaagaagatacgtcttttgggggcaacctcgggcgcgcagtcttccaggccaaaaagcgggttctcgaacctctgggcctggttgaatcgccggttaggacggctcctggaaagaagagaccggtagagccatcaccccagcgctctccagactcctctacgggcatcggcaagagaggccagcagcccgcaagaaagagactcaattttgggcagactggcgactcagagtcagtccccgaccctcaaccaatcggagaaccaccagcagccccctctggtgtgggacctaatacaatggctgcaggcggtggcgctccaatggcagacaataacgaaggcgccgacggagtgggtagttcctcaggaaattggcattgcgattccacatggctgggcgacagagtcatcaccaccagcacccgcacctgggccctgcccacctacaacaaccacctctacaggcaaatctccaacgggacctcgggaggaagcaccaacgacaacacctacttcggctacagcaccccctgggggtattttgacttcaacagattccactgccacttttcaccacgtgactggcagcgactcatcaacaacaactggggattccggcccaagaggctcaacttcaagctcttcaacatccaagtcaaggaggtcacgcagaatgaaggcaccaggaccatcgccaataaccttaccagcacgattcaggtctttacggactcggaataccagctcccgtacgtgctcggctcggcgcaccagggctgcctgcctccgttcccggcggacgtcttcatgattcctcagtacgggtacctgactctgaacaatggcagtcaggctgtgggccggtcgtccttctactgcctggagtactttccttctcaaatgctgagaacgggcaacaactttgaattcagctacaacttcgaggacgtgcccttccacagcagctacgcgcacagccagagcctggaccggctgatgaaccctctcatcgaccagtacttgtactacctgtcccggactcaaagcacgggcggtactgcaggaactcagcagttgctattttctcaggccgggcctaacaacatgtcggctcaggccaagaactggctacccggtccctgctaccggcagcaacgcgtctccacgacactgtcgcagaacaacaacagcaactttgcctggacgggtgccaccaagtatcatctgaatggcagagactctctggtgaatcctggcgttgccatggctacccacagggacgacgaagagcgattttttccatccagcggagtcttaatgtttgggaaacagggagctggaagagacaacgtggactatagcagcgtgatgctaaccagcgaggaagaaataaggaccaccaacccagtggccacagaacagtacggcgtggtggccgataacctgcaacagcaaaacgccgctcctattgtaggggccgtcaatagtcaaggagccttacctggcatggtgtggcagaaccgggacgtgtacctgcagggtcccatctgggccaagattcctcatacggacggcaactttcatccctcgccgctgatgggaggctttggactgaagcatccgcctcctcagatcctgattaaaaacacacctgttcccgcggatcctccgaccaccttcaatcaggccaagctggcttctttcatcacgcagtacagtaccggccaggtcagcgtggagatcgagtgggagctgcagaaggagaacagcaaacgctggaacccagagattcagtacacttccaactactacaaatctacaaatgtggactttgctgtcaatactgagggtacttattccgagcctcgccccattggcacccgttacctcacccgtaatctgtaa

SEQ ID NO: 905 - DNA, 2217 bp, Artificial Sequence
  source: /note="Description of Artificial Sequence: Synthetic polynucleotide"
atggctgccgatggttatcttccagattggctcgaggacaacctctctgagggcattcgcgagtggtgggacctgaaacctggagccccgaaacccaaagccaaccagcaaaggcaggacaacggccggggtctggtgcttcctggctacaggtacctcggacccttcaacggactcgacaagggggagcccgtcaacgcggcggacgcagcggccctcgagcacgacagggcctacgaccagcagctccaagcgggtgacaatccgtacctgcggtataatcacgccgacgccgagtttcaggagcgtctgcaagaagatacgtcttttgggggcaacctcgggcgcgcagtcttccaggccaaaaagcgggttctcgaacctctgggcctggttgaatcgccggttaggacggctcctggaaagaagagaccggtagagccatcaccccagcgctctccagactcctctacgggcatcggcaagagaggccagcagcccgcaaaaaagagactcaattttgggcagactggcgactcagagtcagtccccgaccctcaaccaatcggagaaccaccagcagccccctctggtgtgggacctaatacaatggctgcaggcggtggcgctccaatggcagacaataacgaaggcgccgacggagtgggtagttcctcaggaaattggcattgcgattccacatggctgggcgacagagtcatcaccaccagcacccgcacctgggccctgcccacctacaacaaccacctctacaggcaaatctccaacgggacctcgggaggaagcaccaacgacaacacctacttcggctacagcaccccctgggggtattttgacttcaacagattccactgccacttttcaccacgtgactggcagcgactcatcaacaacaactggggattccggcccaagaggctcaacttcaagctcttcaacatccaagtcaaggaggtcacgcagaatgaaggcaccaggaccatcgccaataaccttaccagcacgattcaggtctttacggactcggaataccagctcccgtacgtgctcggctcggcgcaccagggctgcctgcctccgttcccggcggacgtcttcatgattcctcagtacgggtacctgactctgaacaatggcagtcaggctgtgggccggtcgtccttctactgcctggagtactttccttctcaaatgctgagaacgggcaacaactttgaattcagctacaacttcgaggacgtgcccttccacagcagctacgcgcacagccagagcctggaccggctgatgaaccctctcatcgaccagtacttgtactacctgtcccggactcaaagcacgggcggtactgcaggaactcagcagttgctattttctcaggccgggcctaacaacatgtcggctcaggccaagaactggctacccggtccctgctaccggcagcaacgcgtctccacgacactgtcgcagaacaacaacagcaactttgcctggacgggtgccaccaagtatcatctgaatggcagagactctctggtgaatcctggcgttgccatggctacccacagggacgacgaagagcgattttttccatccagcggagtcttaatgtttgggagacagggagctggaagagacaacgtggactatagcagcgtgatgctaaccagcgaggaagaaataaggaccaccaacccagtggccacagaacagtacggcgtggtggccgataacctgcaacagcaaaacgccgctcctattgtaggggccgtcaatagtcaaggagccttacctggcatggtgtggcagaaccgggacgtgtacctgcagggtcccatctgggccaagattcctcatacggacggcaactttcatccctcgccgctgatgggaggctttggactgaagcatccgcctcctcagatcctgattaaaaacacacctgttcccgcggatcctccgaccaccttcaatcaggccaagctggcttctttcatcacgcagtacagtaccggccaggtcagcgtggagatcgagtgggagctgcagaaggagaacagcaaacgctggaacccagagattcagtacacttccaactactacaaatctacaaatgtggactttgctgtcaatactgagggtacttattccgagcctcgccccattggcacccgttacctcacccgtaatctgtaa

SEQ ID NO: 906 - DNA, 2217 bp, Artificial Sequence
  source: /note="Description of Artificial Sequence: Synthetic polynucleotide"
atggctgccgatggttatcttccagattggctcgaggacaacctctctgagggcattcgcgagtggtgggacctgaaacctggagccccgaaacccaaagccaaccagcaaaggcaggacaacggccggggtctggtgcttcctggctacaggtacctcggacccttcaacggactcgacaagggggagcccgtcaacgcggcggacgcagcggccctcgagcacgacagggcctacgaccagcagctccaagcgggtgacaatccgtacctgcggtataatcacgccgacgccgagtttcaggagcgtctgcaagaagatacgtcttttgggggcaacctcgggcgcgcagtcttccaggccaaaaagcgggttctcgaacctctgggcctggttgaatcgccggttaggacggctcctggaaagaagagaccggtagagccatcaccccagcgctctccagactcctctacgggcatcggcaagagaggccagcagcccgcaaaaaagagactcaattttgggcagactggcgactcagagtcagtccccgaccctcaaccaatcggagaaccaccagcagccccctctggtgtgggacctaatacaatggctgcaggcggtggcgctccaatggcagacaataacgaaggcgccgacggagtgggtagttcctcaggaaattggcattgcgattccacatggctgggcgacagagtcatcaccaccagcacccgcacctgggccctgcccacctacaacaaccacctctacaggcaaatctccaacgggacctcgggaggaagcaccaacgacaacacctacttcggctacagcaccccctgggggtattttgacttcaacagattccactgccacttttcaccacgtgactggcagcgactcatcaacaacaactggggattccggcccaagaggctcaacttcaagctcttcaacatccaagtcaaggaggtcacgcagaatgaaggcaccaggaccatcgccaataaccttaccagcacgattcaggtctttacggactcggaataccagctcccgtacgtgctcggctcggcgcaccagggctgcctgcctccgttcccggcggacgtcttcatgattcctcagtacgggtacctgactctgaacaatggcagtcaggctgtgggccggtcgtccttctactgcctggagtactttccttctcaaatgctgagaacgggcaacaactttgaattcagctacaacttcgaggacgtgcccttccacagcagctacgcgcacagccagagcctggaccggctgatgaaccctctcatcgaccagtacttgtactacctgtcccggactcaaagcacgggcggtactgcaggaactcagcagttgctattttctcaggccgggcctaacaacatgtcggctcaggccaagaactggctacccggtccctgctaccggcagcaacgcgtctccacgacactgtcgcagaacaacaacagcaactttgcctggacgggtgccaccaagtatcatctgaatggcagagactctctggtgaatcctggcgttgccatggctacccacagggacgacgaagagcgattttttccatccagcggagtcttaatgtttgggaaacagggagctggaagagacaacgtggactatagcagcgtgatgctaaccagcgaggaagaaataaggaccaccaacccagtggccacagaacagtacggcgtggtggccgataacctgcaacagcaaaacgccgctcctattgtaggggccgtcaatagtcaaggagccttacctggcatggtgtggcagaaccgggacgtgtacctgcagggtcccatctgggccaagattcctcatacggacggcaactttcatccctcgccgctgatgggaggctttggactgaagcatccgcctcctcagatcctgattaaaaacacacctgttcccgcggatcctccgaccaccttcaatcaggccaggctggcttctttcatcacgcagtacagtaccggccaggtcagcgtggagatcgagtgggagctgcagaaggagaacagcaaacgctggaacccagagattcagtacacttccaactactacaaatctacaaatgtggactttgctgtcaatactgagggtacttattccgagcctcgccccattggcacccgttacctcacccgtaatctgtaa

SEQ ID NO: 907 - DNA, 2217 bp, Artificial Sequence
  source: /note="Description of Artificial Sequence: Synthetic polynucleotide"
atggctgccgatggttatcttccagattggctcgaggacaacctctctgagggcattcgcgagtggtgggacctgaaacctggagccccgaaacccaaagccaaccagcaaaggcaggacaacggccggggtctggtgcttcctggctacaggtacctcggacccttcaacggactcgacaagggggagcccgtcaacgcggcggacgcagcggccctcgagcacgacagggcctacgaccagcagctccaagcgggtgacaatccgtacctgcggtataatcacgccgacgccgagtttcaggagcgtctgcaagaagatacgtcttttgggggcaacctcgggcgcgcagtcttccaggccaaaaagcgggttctcgaacctctgggcctggttgaatcgccggttaggacggctcctggaaagaagagaccggtagagccatcaccccagcgctctccagactcctctacgggcatcggcaagaaaggccagcagcccgcaaaaaagagactcaattttgggcagactggcgactcagagtcagtccccgaccctcaaccaatcggagaaccaccagcagccccctctggtgtgggacctaatacaatggctgcaggcggtggcgctccaatggcagacaataacgaaggcgccgacggagtgggtagttcctcaggaaattggcattgcgattccacatggctgggcgacagagtcatcaccaccagcacccgcacctgggccctgcccacctacaacaaccacctctacaggcaaatctccaacgggacctcgggaggaagcaccaacgacaacacctacttcggctacagcaccccctgggggtattttgacttcaacagattccactgccacttttcaccacgtgactggcagcgactcatcaacaacaactggggattccggcccaagaggctcaacttcaagctcttcaacatccaagtcaaggaggtcacgcagaatgaaggcaccaggaccatcgccaataaccttaccagcacgattcaggtctttacggactcggaataccagctcccgtacgtgctcggctcggcgcaccagggctgcctgcctccgttcccggcggacgtcttcatgattcctcagtacgggtacctgactctgaacaatggcagtcaggctgtgggccggtcgtccttctactgcctggagtactttccttctcaaatgctgagaacgggcaacaactttgaattcagctacaacttcgaggacgtgcccttccacagcagctacgcgcacagccagagcctggaccggctgatgaaccctctcatcgaccagtacttgtactacctgtcccggactcaaagcacgggcggtactgcaggaactcagcagttgctattttctcaggccgggcctaacaacatgtcggctcaggccaagaactggctacccggtccctgctaccggcagcaacgcgtctccacgacactgtcgcagaacaacaacagcaactttgcctggacgggtgccaccaagtatcatctgaatggcagagactctctggtgaatcctggcgttgccatggctacccacagggacgacgaagagcgattttttccatccagcggagtcttaatgtttgggagacagggagctggaagagacaacgtggactatagcagcgtgatgctaaccagcgaggaagaaataaggaccaccaacccagtggccacagaacagtacggcgtggtggccgataacctgcaacagcaaaacgccgctcctattgtaggggccgtcaatagtcaaggagccttacctggcatggtgtggcagaaccgggacgtgtacctgcagggtcccatctgggccaagattcctcatacggacggcaactttcatccctcgccgctgatgggaggctttggactgaagcatccgcctcctcagatcctgattaaaaacacacctgttcccgcggatcctccgaccaccttcaatcaggccaggctggcttctttcatcacgcagtacagtaccggccaggtcagcgtggagatcgagtgggagctgcagaaggagaacagcaaacgctggaacccagagattcagtacacttccaactactacaaatctacaaatgtggactttgctgtcaatactgagggtacttattccgagcctcgccccattggcacccgttacctcacccgtaatctgtaa

SEQ ID NO: 908 - protein, 744 aa, Artificial Sequence
  source: /note="Description of Artificial Sequence: Synthetic polypeptide"
MAADGYLPDWLEDTLSEGIRQWWKLKPGPPPPKPAERHKDDSRGLVLPGYKYLGPFNGLDKGEPVNEADAAALEHDKAYDRQLDSGDNPYLKYNHADAEFQERLKEDTSFGGNLGRAVFQAKKRVLEPLGLVEEPVKTAPGKKRPVEHSPVEPDSSSGTGKAGQQPARKRLNFGQTGDADSVPDPQPLGQPPAAPSGLGTNTMATGSGAPMADNNEGADGVGNSSGNWHCDSTWMGDRVITTSTRTWALPTYNNHLYKQISSQSGASNDNHYFGYSTPWGYFDFNRFHCHFSPRDWQRLINNNWGFRPKRLNFKLFNIQVKEVTQNDGTTTIANNLTSTVQVFTDSEYQLPYVLGSAHQGCLPPFPADVFMVPQYGYLTLNNGSQAVGRSSFYCLEYFPSQMLRTGNNFTFSYTFEDVPFHSSYAHSQSLDRLMNPLIDQYLYYLSRTNTPSGTTTQSRLQFSQAGASDIRDQSRNWLPGPCYRQQRVSKTSADNNNSEYSWTGATKYHLNGRDSLVNPGPAMASHKDDEEKFFPQSGVLIFGKQGSEKTNVDIEKVMITDEEEIRTTNPVATEQYGSVSTNLQRGQRGESGHGYFAQAATADVNTQGVLPGMVWQDRDVYLQGPIWAKIPHTDGHFHPSPLMGGFGLKHPPPQILIKNTPVPANPSTTFSAAKFASFITQYSTGQVSVEIEWELQKENSKRWNPEIQYTSNYNKSVNVDFTVDTNGVYSEPRPIGTRYLTRNL

SEQ ID NO: 909 - DNA, 8359 bp, Artificial Sequence
  source: /note="Description of Artificial Sequence: Synthetic polynucleotide"
catcatcaataatataccttattttggattgaagccaatatgataatgagggggtggagtttgtgacgtggcgcggggcgtgggaacggggcgggtgacgtagtagctctagaggtcctgtattagaggtcacgtgagtgttttgcgacattttgcgacaccatgtggtcacgctgggtatttaagcccgagtgagcacgcagggtctccattttgaagcgggaggtttgaacgcgcagccgccatgccggggttttacgagattgtgattaaggtccccagcgaccttgacgagcatctgcccggcatttctgacagctttgtgaactgggtggccgagaaggaatgggagttgccgccagattctgacatggatctgaatctgattgagcaggcacccctgaccgtggccgagaagctgcagcgcgactttctgacggaatggcgccgtgtgagtaaggcaccggaggcccttttctttgtgcaatttgagaagggagagagctacttccacatgcacgtgctcgtggaaaccaccggggtgaaatccatggttttgggacgtttcctgagtcagattcgcgaaaaactgattcagagaatttaccgcgggatcgagccgactttgccaaactggttcgcggtcacaaagaccagaaatggcgccggaggcgggaacaaggtggtggatgagtgctacatccccaattacttgctccccaaaacccagcctgagctccagtgggcgtggactaatatggaacagtatttaagcgcctgtttgaatctcacggagcgtaaacggttggtggcgcagcatctgacgcacgtgtcgcagacgcaggagcagaacaaagagaatcagaatcccaattctgatgcgccggtgatcagatcaaaaacttcagccaggtacatggagctggtcgggtggctcgtggacaaggggattacctcggagaagcagtggatccaggaggaccaggcctcatacatctccttcaatgcggcctccaactcgcggtcccaaatcaaggctgccttggacaatgcgggaaagattatgagcctgactaaaaccgcccccgactacctggtgggccagcagcccgtggaggacatttccagcaatcggatttataaaattttggaactaaacgggtacgatccccaatatgcggcttccgtctttctgggatgggccacgaaaaagttcggcaagaggaacaccatctggctgtttgggcctgcaactaccgggaagaccaacatcgcggaggccatagcccacactgtgcccttctacgggtgcgtaaactggaccaatgagaactttcccttcaacgactgtgtcgacaagatggtgatctggtgggaggaggggaagatgaccgccaaggtcgtggagtcggccaaagccattctcggaggaagcaaggtgcgcgtggaccagaaatgcaagtcctcggcccagatagacccgactcccgtgatcgtcacctccaacaccaacatgtgcgccgtgattgacgggaactcaacgaccttcgaacaccagcagccgttgcaagaccggatgttcaaatttgaactcacccgccgtctggatcatgactttgggaaggtcaccaagcaggaagtcaaagactttttccggtgggcaaaggatcacgtggttgaggtggagcatgaattctacgtcaaaaagggtggagccaagaaaagacccgcccccagtgacgcagatataagtgagcccaaacgggtgcgcgagtcagttgcgcagccatcgacgtcagacgcggaagcttcgatcaactacgcagacaggtaccaaaacaaatgttctcgtcacgtgggcatgaatctgatgctgtttccctgcagacaatgcgagagaatgaatcagaattcaaatatctgcttcactcacggacagaaagactgtttagagtgctttcccgtgtcagaatctcaacccgtttctgtcgtcaaaaaggcgtatcagaaactgtgctacattcatcatatcatgggaaaggtgccagacgcttgcactgcctgcgatctggtcaatgtggatttggatgactgcatctttgaacaataaatgatttaaatcaggtatggctgccgatggttatcttccagattggctcgaggacactctctctgaaggaataagacagtggtggaagctcaaacctggcccaccaccaccaaagcccgcagagcggcataaggacgacagcaggggtcttgtgcttcctgggtacaagtacctcggacccttcaacggactcgacaagggagagccggtcaacgaggcagacgccgcggccctcgagcacgacaaagcctacgaccggcagctcgacagcggagacaacccgtacctcaagtacaaccacgccgacgcggagtttcaggagcgccttaaagaagatacgtcttttgggggcaacctcggacgagcagtcttccaggcgaaaaagagggttcttgaacctctgggcctggttgaggaacctgttaagacggctccgggaaaaaagaggccggtagagcactctcctgtggagccagactcctcctcgggaaccggaaaggcgggccagcagcctgcaagaaaaagattgaattttggtcagactggagacgcagactcagtacctgacccccagcctctcggacagccaccagcagccccctctggtctgggaactaatacgatggctacaggcagtggcgcaccaatggcagacaataacgagggcgccgacggagtgggtaattcctcgggaaattggcattgcgattccacatggatgggcgacagagtcatcaccaccagcacccgaacctgggccctgcccacctacaacaaccacctctacaaacaaatttccagccaatcaggagcctcgaacgacaatcactactttggctacagcaccccttgggggtattttgacttcaacagattccactgccacttttcaccacgtgactggcaaagactcatcaacaacaactggggattccgacccaagagactcaacttcaagctctttaacattcaagtcaaagaggtcacgcagaatgacggtacgacgacgattgccaataaccttaccagcacggttcaggtgtttactgactcggagtaccagctcccgtacgtcctcggctcggcgcatcaaggatgcctcccgccgttcccagcagacgtcttcatggtgccacagtatggatacctcaccctgaacaacgggagtcaggcagtaggacgctcttcattttactgcctggagtactttccttctcagatgctgcgtaccggaaacaactttaccttcagctacacttttgaggacgttcctttccacagcagctacgctcacagccagagtctggaccgtctcatgaatcctctcatcgaccagtacctgtattacttgagcagaacaaacactccaagtggaaccaccacgcagtcaaggcttcagttttctcaggccggagcgagtgacattcgggaccagtctaggaactggcttcctggaccctgttaccgccagcagcgagtatcaaagacatctgcggataacaacaacagtgaatactcgtggactggagctaccaagtaccacctcaatggcagagactctctggtgaatccgggcccggccatggcaagccacaaggacgatgaagaaaagttttttcctcagagcggggttctcatctttgggaagcaaggctcagagaaaacaaatgtggacattgaaaaggtcatgattacagacgaagaggaaatcaggacaaccaatcccgtggctacggagcagtatggttctgtatctaccaacctccagagaggccagagaggcgagtctggtcatggttattttgcccaggcggccaccgcagatgtcaacacacaaggcgttcttccaggcatggtctggcaggacagagatgtgtaccttcaggggcccatctgggcaaagattccacacacggacggacattttcacccctctcccctcatgggtggattcggacttaaacaccctcctccacagattctcatcaagaacaccccggtacctgcgaatccttcgaccaccttcagtgcggcaaagtttgcttccttcatcacacagtactccacgggacaggtcagcgtggagatcgagtgggagctgcagaaggaaaacagcaaacgctggaatcccgaaattcagtacacttccaactacaacaagtctgttaatgtggactttactgtggacactaatggcgtgtattcagagcctcgccccattggcaccagatacctgactcgtaatctgtaattgcttgttaatcaataaaccgtttaattcgtttcagttgaactttggtctctgcgtatttctttcttatctagtttccatgctctagaggtcctgtattagaggtcacgtgagtgttttgcgacattttgcgacaccatgtggtcacgctgggtatttaagcccgagtgagcacgcagggtctccattttgaagcgggaggtttgaacgcgcagccaccacggcggggttttacgagattgtgattaaggtccccagcgaccttgacgagcatctgcccggcatttctgacagctttgtgaactgggtggccgagaaggaatgggagttgccgccagattctgacatggatctgaatctgattgagcaggcacccctgaccgtggccgagaagctgcatcgctggcgtaatagcgaagaggcccgcaccgatcgcccttcccaacagttgcgcagcctgaatggcgaatggcgattccgttgcaatggctggcggtaatattgttctggatattaccagcaaggccgatagtttgagttcttctactcaggcaagtgatgttattactaatcaaagaagtattgcgacaacggttaatttgcgtgatggacagactcttttactcggtggcctcactgattataaaaacacttctcaggattctggcgtaccgttcctgtctaaaatccctttaatcggcctcctgtttagctcccgctctgattctaacgaggaaagcacgttatacgtgctcgtcaaagcaaccatagtacgcgccctgtagcggcgcattaagcgcggcgggtgtggtggttacgcgcagcgtgaccgctacacttgccagcgccctagcgcccgctcctttcgctttcttcccttcctttctcgccacgttcgccggctttccccgtcaagctctaaatcgggggctccctttagggttccgatttagtgctttacggcacctcgaccccaaaaaacttgattagggtgatggttcacgtagtgggccatcgccctgatagacggtttttcgccctttgacgttggagtccacgttctttaatagtggactcttgttccaaactggaacaacactcaaccctatctcggtctattcttttgatttataagggattttgccgatttcggcctattggttaaaaaatgagctgatttaacaaaaatttaacgcgaattttaacaaaatattaacgtttacaatttaaatatttgcttatacaatcttcctgtttttggggcttttctgattatcaaccggggtacatatgattgacatgctagttttacgattaccgttcatcgattctcttgtttgctccagactctcaggcaatgacctgatagcctttgtagagacctctcaaaaatagctaccctctccggcatgaatttatcagctagaacggttgaatatcatattgatggtgatttgactgtctccggcctttctcacccgtttgaatctttacctacacattactcaggcattgcatttaaaatatatgagggttctaaaaatttttatccttgcgttgaaataaaggcttctcccgcaaaagtattacagggtcataatgtttttggtacaaccgatttagctttatgctctgaggctttattgcttaattttgctaattctttgccttgcctgtatgatttattggatgttggaattcctgatgcggtattttctccttacgcatctgtgcggtatttcacaccgcatatggtgcactctcagtacaatctgctctgatgccgcatagttaagccagccccgacacccgccaacacccgctgacgcgccctgacgggcttgtctgctcccggcatccgcttacagacaagctgtgaccgtctccgggagctgcatgtgtcagaggttttcaccgtcatcaccgaaacgcgcgagacgaaagggcctcgtgatacgcctatttttataggttaatgtcatgataataatggtttcttagacgtcaggtggcacttttcggggaaatgtgcgcggaacccctatttgtttatttttctaaatacattcaaatatgtatccgctcatgagacaataaccctgataaatgcttcaataatattgaaaaaggaagagtatgagtattcaacatttccgtgtcgcccttattcccttttttgcggcattttgccttcctgtttttgctcacccagaaacgctggtgaaagtaaaagatgctgaagatcagttgggtgcacgagtgggttacatcgaactggatctcaacagcggtaagatccttgagagttttcgccccgaagaacgttttccaatgatgagcacttttaaagttctgctatgtggcgcggtattatcccgtattgacgccgggcaagagcaactcggtcgccgcatacactattctcagaatgacttggttgagtactcaccagtcacagaaaagcatcttacggatggcatgacagtaagagaattatgcagtgctgccataaccatgagtgataacactgcggccaacttacttctgacaacgatcggaggaccgaaggagctaaccgcttttttgcacaacatgggggatcatgtaactcgccttgatcgttgggaaccggagctgaatgaagccataccaaacgacgagcgtgacaccacgatgcctgtagcaatggcaacaacgttgcgcaaactattaactggcgaactacttactctagcttcccggcaacaattaatagactggatggaggcggataaagttgcaggaccacttctgcgctcggcccttccggctggctggtttattgctgataaatctggagccggtgagcgtgggtctcgcggtatcattgcagcactggggccagatggtaagccctcccgtatcgtagttatctacacgacggggagtcaggcaactatggatgaacgaaatagacagatcgctgagataggtgcctcactgattaagcattggtaactgtcagaccaagtttactcatatatactttagattgatttaaaacttcatttttaatttaaaaggatctaggtgaagatcctttttgataatctcatgaccaaaatcccttaacgtgagttttcgttccactgagcgtcagaccccgtagaaaagatcaaaggatcttcttgagatcctttttttctgcgcgtaatctgctgcttgcaaacaaaaaaaccaccgctaccagcggtggtttgtttgccggatcaagagctaccaactctttttccgaaggtaactggcttcagcagagcgcagataccaaatactgtccttctagtgtagccgtagttaggccaccacttcaagaactctgtagcaccgcctacatacctcgctctgctaatcctgttaccagtggctgctgccagtggcgataagtcgtgtcttaccgggttggactcaagacgatagttaccggataaggcgcagcggtcgggctgaacggggggttcgtgcacacagcccagcttggagcgaacgacctacaccgaactgagatacctacagcgtgagctatgagaaagcgccacgcttcccgaagggagaaaggcggacaggtatccggtaagcggcagggtcggaacaggagagcgcacgagggagcttccagggggaaacgcctggtatctttatagtcctgtcgggtttcgccacctctgacttgagcgtcgatttttgtgatgctcgtcaggggggcggagcctatggaaaaacgccagcaacgcggcctttttacggttcctggccttttgctggccttttgctcacatgttctttcctgcgttatcccctgattctgtggataaccgtattaccgcctttgagtgagctgataccgctcgccgcagccgaacgaccgagcgcagcgagtcagtgagcgaggaagcggaagagcgcccaatacgcaaaccgcctctccccgcgcgttggccgattcattaatgcagaattcc

SEQ ID NO: 910 - protein, 736 aa, Artificial Sequence
  source: /note="Description of Artificial Sequence: Synthetic polypeptide"
  VARIANT (168)..(168): /replace="Arg"
  VARIANT (204)..(204): /replace="Ser"
  VARIANT (266)..(266): /replace="Gly"
  VARIANT (311)..(311): /replace="Lys"
  VARIANT (411)..(411): /replace="Gln"
  VARIANT (460)..(460): /replace="Glu"
  VARIANT (493)..(493): /replace="Thr"
  VARIANT (562)..(562): /replace="Asn"
  VARIANT (576)..(576): /replace="Glu"
  VARIANT (587)..(587): /replace="Ala"
  VARIANT (609)..(609): /replace="Asp"
  SITE (1)..(736): /note="Variant residues given in the sequence have no preference with respect to those in the annotations for variant positions"
MAADGYLPDWLEDNLSEGIREWWDLKPGAPKPKANQQKQDDGRGLVLPGYKYLGPFNGLDKGEPVNAADAAALEHDKAYDQQLKAGDNPYLRYNHADAEFQERLQEDTSFGGNLGRAVFQAKKRVLEPLGLVEEGAKTAPGKKRPVEQSPQEPDSSSGIGKKGQQPAKKRLNFGQTGDSESVPDPQPLGEPPAAPSGVGSNTMAAGGGAPMADNNEGADGVGNASGNWHCDSTWLGDRVITTSTRTWALPTYNNHLYKQISSQSGASTNDNTYFGYSTPWGYFDFNRFHCHFSPRDWQRLINNNWGFRPKRLNFKLFNIQVKEVTTNDGTTTIANNLTSTVQVFTDSEYQLPYVLGSAHQGCLPPFPADVFMIPQYGYLTLNNGSQAVGRSSFYCLEYFPSQMLRTGNNFEFSYTFEDVPFHSSYAHSQSLDRLMNPLIDQYLYYLSRTQTTSGTAGNRTLQFSQAGPSSMANQAKNWLPGPCYRQQRVSKTANQNNNSNFAWTGATKYHLNGRDSLVNPGPAMATHKDDEDKFFPMSGVLIFGKQGAGNSNVDLDNVMITSEEEIKTTNPVATEQYGTVATNLQSNNTAPATGTVNSQGALPGMVWQNRDVYLQGPIWAKIPHTDGHFHPSPLMGGFGLKHPPPQILIKNTPVPANPPTTFSPAKFASFITQYSTGQVSVEIEWELQKENSKRWNPEIQYTSNYNKSTNVDFAVDTNGVYSEPRPIGTRYLTRNL

SEQ ID NO: 911 - DNA, 2208 bp, Artificial Sequence
  source: /note="Description of Artificial Sequence: Synthetic polynucleotide"
  Variation (502)..(504): /replace="aaa"
  Variation (610)..(612): /replace="agc"
  Variation (796)..(798): /replace="ggc"
  Variation (931)..(933): /replace="aag"
  Variation (1231)..(1233): /replace="cag"
  Variation (1378)..(1380): /replace="gag"
  Variation (1477)..(1479): /replace="acc"
  Variation (1684)..(1686): /replace="aac"
  Variation (1726)..(1728): /replace="gag"
  Variation (1759)..(1761): /replace="gcc"
  Variation (1825)..(1827): /replace="gac"
  misc_feature (1)..(2208): /note="Variant nucleotides given in the sequence have no preference with respect to those in the annotations for variant positions"
atggctgccgatggttatcttccagattggctcgaggacaacctctctgagggcattcgcgagtggtgggacttgaaacctggagccccgaaacccaaagccaaccagcaaaagcaggacgacggccggggtctggtgcttcctggctacaagtacctcggacccttcaacggactcgacaagggggagcccgtcaacgcggcggacgcagcggccctcgagcacgacaaggcctacgaccagcagctcaaagcgggtgacaatccgtacctgcggtataaccacgccgacgccgagtttcaggagcgtctgcaagaagatacgtcttttgggggcaacctcgggcgagcagtcttccaggccaagaagcgggttctcgaacctctcggtctggttgaggaaggcgctaagacggctcctggaaagaagagaccggtagagcaatcaccccaggaaccagactcctcttcgggcatcggcaagaaaggccagcagcccgcgaagaagagactcaactttgggcagacaggcgactcagagtcagtgcccgaccctcaaccactcggagaaccccccgcagccccctctggtgtgggatctaatacaatggcagcaggcggtggcgctccaatggcagacaataacgaaggcgccgacggagtgggtaacgcctcaggaaattggcattgcgattccacatggctgggcgacagagtcatcaccaccagcacccgaacctgggccctccccacctacaacaaccacctctacaagcaaatctccagccaatcgggagcaagcaccaacgacaacacctacttcggctacagcaccccctgggggtattttgactttaacagattccactgccacttctcaccacgtgactggcagcgactcatcaacaacaactggggattccggcccaagagactcaacttcaagctcttcaacatccaggtcaaggaggtcacgacgaatgatggcaccacgaccatcgccaataaccttaccagcacggttcaggtctttacggactcggaataccagctcccgtacgtcctcggctctgcgcaccagggctgcctgcctccgttcccggcggacgtcttcatgattcctcagtacgggtacctgactctgaacaatggcagtcaggccgtgggccgttcctccttctactgcctggagtactttccttctcaaatgctgagaacgggcaacaactttgagttcagctacacgtttgaggacgtgccttttcacagcagctacgcgcacagccaaagcctggaccggctgatgaaccccctcatcgaccagtacctgtactacctgtctcggactcagaccacgagtggtaccgcaggaaatcggacgttgcaattttctcaggccgggcctagtagcatggcgaatcaggccaaaaactggctacccgggccctgctaccggcagcaacgcgtctccaagacagcgaatcaaaataacaacagcaactttgcctggaccggtgccaccaagtatcatctgaatggcagagactctctggtaaatcccggtcccgctatggcaacccacaaggacgacgaagacaaattttttccgatgagcggagtcttaatatttgggaaacagggagctggaaatagcaacgtggaccttgacaacgttatgataaccagtgaggaagaaattaaaaccaccaacccagtggccacagaacagtacggcacggtggccactaacctgcaatcgtcaaacaccgctcctgctacagggaccgtcaacagtcaaggagccttacctggcatggtctggcagaaccgggacgtgtacctgcagggtcctatctgggccaagattcctcacacggacggacactttcatccctcgccgctgatgggaggctttggactgaaacacccgcctcctcagatcctgattaagaatacacctgttcccgcgaatcctccaactaccttcagtccagctaagtttgcgtcgttcatcacgcagtacagcaccggacaggtcagcgtggaaattgaatgggagctgcagaaagaaaacagcaaacgctggaacccagagattcaatacacttccaactacaacaaatctacaaatgtggactttgctgttgacacaaatggcgtttattctgagcctcgccccatcggcacccgttacctcacccgtaatctg

SEQ ID NO: 912 - protein, 737 aa, Artificial Sequence
  source: /note="Description of Artificial Sequence: Synthetic polypeptide"
  VARIANT (157)..(157): /replace="Ser"
  VARIANT (168)..(168): /replace="Arg"
  VARIANT (262)..(262): /replace="Ser"
  VARIANT (263)..(263): /replace="His"
  VARIANT (312)..(312): /replace="Lys"
  VARIANT (412)..(412): /replace="Gln"
  VARIANT (460)..(460): /replace="Gln"
  VARIANT (461)..(461): /replace="Glu"
  VARIANT (552)..(552): /replace="Ser"
  VARIANT (556)..(556): /replace="Tyr"
  VARIANT (557)..(557): /replace="Ser"
  VARIANT (563)..(563): /replace="Asn"
  VARIANT (580)..(580): /replace="Ile"
  VARIANT (588)..(588): /replace="Ser"
  VARIANT (664)..(664): /replace="Thr"
  SITE (1)..(737): /note="Variant residues given in the sequence have no preference with respect to those in the annotations for variant positions"
MAADGYLPDWLEDNLSEGIREWWDLKPGAPKPKANQQKQDDGRGLVLPGYKYLGPFNGLDKGEPVNAADAAALEHDKAYDQQLKAGDNPYLRYNHADAEFQERLQEDTSFGGNLGRAVFQAKKRVLEPLGLVEEGAKTAPGKKRPVEQSPQEPDSSTGIGKKGQQPAKKRLNFGQTGDSESVPDPQPLGEPPAAPSGVGSNTMAAGGGAPMADNNEGADGVGNASGNWHCDSTWLGDRVITTSTRTWALPTYNNHLYKQISNSQSGGSTNDNTYFGYSTPWGYFDFNRFHCHFSPRDWQRLINNNWGFRPKLLNFKLFNIQVKEVTTNDGTTTIANNLTSTVQVFTDSEYQLPYVLGSAHQGCLPPFPADVFMIPQYGYLTLNNGSQAVGRSSFYCLEYFPSQMLRTGNNFEFSYTFEDVPFHSSYAHSQSLDRLMNPLIDQYLYYLSRTQTTGGTAGNRTLQFSQAGPSSMANQAKNWLPGPCYRQQRVSKTTNQNNNSNFAWTGATKYHLNGRDSLVNPGVAMATHKDDEDRFFPSSGVLIFGKQGAGNDNVDLDNVMITSEEEIKTTNPVATEEYGVVATNLQSANTAPQTGTVNSQGALPGMVWQNRDVYLQGPIWAKIPHTDGNFHPSPLMGGFGLKHPPPQILIKNTPVPANPPTTFPPAKFASFITQYSTGQVSVEIEWELQKENSKRWNPEIQYTSNYNKSTNVDFAVDTEGVYSEPRPIGTRYLTRNL

SEQ ID NO: 913 - DNA, 2211 bp, Artificial Sequence
  source: /note="Description of Artificial Sequence: Synthetic polynucleotide"
  Variation (469)..(471): /replace="agc"
  Variation (502)..(504): /replace="aag"
  Variation (784)..(786): /replace="agt"
  Variation (787)..(789): /replace="cac"
  Variation (934)..(936): /replace="aag"
  Variation (1234)..(1236): /replace="cag"
  Variation (1378)..(1380): /replace="cag"
  Variation (1381)..(1383): /replace="gag"
  Variation (1654)..(1656): /replace="agc"
  Variation (1666)..(1668): /replace="tac"
  Variation (1669)..(1671): /replace="agc"
  Variation (1687)..(1689): /replace="aac"
  Variation (1738)..(1740): /replace="atc"
  Variation (1762)..(1764): /replace="agc"
  Variation (1990)..(1992): /replace="acc"
  misc_feature (1)..(2211): /note="Variant nucleotides given in the sequence have no preference with respect to those in the annotations for variant positions"
atggctgccgatggttatcttccagattggctcgaggacaacctctctgagggcattcgcgagtggtgggacttgaaacctggagccccgaaacccaaagccaaccagcaaaagcaggacgacggccggggtctggtgcttcctggctacaagtacctcggacccttcaacggactcgacaagggggagcccgtcaacgcggcggacgcagcggccctcgagcacgacaaggcctacgaccagcagctcaaagcgggtgacaatccgtacctgcggtataaccacgccgacgccgagtttcaggagcgtctgcaagaagatacgtcttttgggggcaacctcgggcgagcagtcttccaggccaagaagcgggttctcgaacctctcggtctggttgaggaaggcgctaagacggctcctggaaagaagagaccggtagagcaatcaccccaggaaccagactcctctacgggcatcggcaagaaaggccagcagcccgcgaaaaagagactcaactttgggcagactggcgactcagagtcagtgcccgaccctcaaccactcggagaaccccccgcagccccctctggtgtgggatctaatacaatggctgcaggcggtggcgctccaatggcagacaataacgaaggcgccgacggagtgggtaatgcctcaggaaattggcattgcgattccacatggctgggcgacagagtcatcaccaccagcacccgaacctgggccctccccacctacaacaaccacctctacaagcaaatctccaacagccaatcgggaggaagcaccaacgacaacacctacttcggctacagcaccccctgggggtattttgactttaacagattccactgccacttctcaccacgtgactggcagcgactcatcaacaacaactggggattccggcccaagagactcaacttcaagctcttcaacatccaggtcaaggaggtcacgacgaatgatggcaccacgaccatcgccaataaccttaccagcacggttcaggtctttacggactcggaataccagctcccgtacgtcctcggctctgcgcaccagggctgcctgcctccgttcccggcggacgtcttcatgattcctcagtacgggtacctgactctgaacaatggcagtcaggccgtgggccgttcctccttctactgcctggagtactttccttctcaaatgctgagaacgggcaacaactttgagttcagctacacgtttgaggacgtgccttttcacagcagctacgcgcacagccaaagcctggaccggctgatgaaccccctcatcgaccagtacctgtactacctgtctcggactcagaccacgggaggtaccgcaggaaatcggacgttgcaattttctcaggccgggcctagtagcatggcgaatcaggccaaaaactggctacccgggccctgctaccggcagcaacgcgtctccaagacaacgaatcaaaataacaacagcaactttgcctggaccggtgccaccaagtatcatctgaatggcagagactctctggtaaatcccggtgtcgctatggcaacccacaaggacgacgaagaccgattttttccgtccagcggagtcttaatatttgggaaacagggagctggaaatgacaacgtggaccttgacaacgttatgataaccagtgaggaagaaattaaaaccaccaacccagtggccacagaagagtacggcgtggtggccactaacctgcaatcggcaaacaccgctcctcaaacagggaccgtcaacagtcaaggagccttacctggcatggtctggcagaaccgggacgtgtacctgcagggtcctatctgggccaagattcctcacacggacggaaactttcatccctcgccgctgatgggaggctttggactgaaacacccgcctcctcagatcctgattaagaatacacctgttcccgcgaatcctccaactaccttcccgccagctaagtttgcgtcgttcatcacgcagtacagcaccggacaggtcagcgtggaaattgaatgggagctgcagaaagaaaacagcaaacgctggaacccagagattcaatacacttccaactacaacaaatctacaaatgtggactttgctgttgacacagaaggcgtttattctgagcctcgccccatcggcacccgttacctcacccgtaatctg

SEQ ID NO: 914 - protein, 738 aa, Artificial Sequence
  source: /note="Description of Artificial Sequence: Synthetic polypeptide"
  VARIANT (158)..(158): /replace="Ser"
  VARIANT (169)..(169): /replace="Arg"
  VARIANT (564)..(564): /replace="Asn"
  SITE (1)..(738): /note="Variant residues given in the sequence have no preference with respect to those in the annotations for variant positions"
MAADGYLPDWLEDNLSEGIREWWDLKPGAPKPKANQQKQDDGRGLVLPGYKYLGPFNGLDKGEPVNAADAAALEHDKAYDQQLKAGDNPYLRYNHADAEFQERLQEDTSFGGNLGRAVFQAKKRVLEPLGLVEEGAKTAPGKKRPVEQSPQREPDSSEGIGKKGQQPAKKRLNFGQTGDSESVPDPQPLGEPPAAPSGVGSNTMAAGGGAPMADNNEGADGVGNSSGNWHCDSTWLGDRVITTSTRTWALPTYNNHLYKQISNGTSGGSTNDNTYFGYSTPWGYFDFNRFHCHFSPRDWQRLINNNWGFRPKRLNFKLFNIQVKEVTTNEGTKTIANNLTSTVQVFTDSEYQLPYVLGSAHQGCLPPFPADVFMIPQYGYLTLNNGSQAVGRSSFYCLEYFPSQMLRTGNNFQFSYTFEDVPFHSSYAHSQSLDRLMNPLIDQYLYYLSRTQTTGGTAGTQTLQFSQAGPSSMANQAKNWLPGPCYRQQRVSTTTNQNNNSNFAWTGATKYHLNGRDSLVNPGVAMATHKDDEDRFFPSSGVLIFGKQGAGNDNVDYSNVMITSEEEIKTTNPVATEEYGVVATNLQSANTAPQTGTVNSQGALPGMVWQNRDVYLQGPIWAKIPHTDGNFHPSPLMGGFGLKHPPPQILIKNTPVPADPPTTFNQAKLNSFITQYSTGQVSVEIEWELQKENSKRWNPEIQYTSNYYKSTNVDFAVNTEGVYSEPRPIGTRYLTRNL

SEQ ID NO: 915 - DNA, 2214 bp, Artificial Sequence
  source: /note="Description of Artificial Sequence: Synthetic polynucleotide"
  Variation (472)..(474): /replace="agc"
  Variation (505)..(507): /replace="aga"
  Variation (1690)..(1692): /replace="aac"
  misc_feature (1)..(2214): /note="Variant nucleotides given in the sequence have no preference with respect to those in the annotations for variant positions"
atggctgccgatggttatcttccagattggctcgaggacaacctctctgagggcattcgcgagtggtgggacctgaaacctggagccccgaaacccaaagccaaccagcaaaagcaggacgacggccggggtctggtgcttcctggctacaagtacctcggacccttcaacggactcgacaagggggagcccgtcaacgcggcggacgcagcggccctcgagcacgacaaggcctacgaccagcagctcaaagcgggtgacaatccgtacctgcggtataatcacgccgacgccgagtttcaggagcgtctgcaagaagatacgtcttttgggggcaacctcgggcgagcagtcttccaggccaagaagcgggttctcgaacctctcggtctggttgaggaaggcgctaagacggctcctggaaagaagagaccggtagagcagtcaccacagcgtgagcccgactcctccacgggcatcggcaagaaaggccagcagcccgccaaaaagagactcaatttcggtcagactggcgactcagagtcagtccccgaccctcaacctctcggagaacctccagcagcgccctctggtgtgggatctaatacaatggctgcaggcggtggcgcaccaatggcagacaataacgaaggtgccgacggagtgggtaattcctcgggaaattggcattgcgattccacatggctgggcgacagagtcatcaccaccagcacccgaacctgggccctgcccacctacaacaaccacctctacaagcaaatctccaacgggacctcgggaggcagcaccaacgacaacacctactttggctacagcaccccctgggggtattttgactttaacagattccactgccacttctcaccacgtgactggcagcgactcatcaacaacaactggggattccggcccaagagactcaacttcaagctcttcaacatccaggtcaaagaggtcacgacgaatgaaggcaccaagaccatcgccaataacctcaccagcaccgtccaggtgtttacggactcggaataccagctgccgtacgtcctcggctctgcccaccagggctgcctgcctccgttcccggcggacgtcttcatgattcctcagtacggctacctgactctcaacaacggtagtcaggccgtgggacgttcctccttctactgcctggagtacttcccctctcagatgctgagaacgggcaacaactttcaattcagctacactttcgaggacgtgcctttccacagcagctacgcgcacagccagagtttggacaggctgatgaatcctctcatcgaccagtacctgtactacctgtcaagaacccagactacgggaggcacagcgggaacccagacgttgcagttttctcaggccgggcctagcagcatggcgaatcaggccaaaaactggctgcctggaccctgctacagacagcagcgcgtctccacgacaacgaatcaaaacaacaacagcaactttgcctggactggtgccaccaagtatcatctgaacggcagagactctctggtgaatccgggcgtcgccatggcaacccacaaggacgacgaggaccgcttcttcccatccagcggcgtcctcatatttggcaagcagggagctggaaatgacaacgtggactatagcaacgtgatgataaccagcgaggaagaaatcaagaccaccaaccccgtggccacagaagagtatggcgtggtggctactaacctacagtcggcaaacaccgctcctcaaacggggaccgtcaacagccagggagccttacctggcatggtctggcagaaccgggacgtgtacctgcagggtcctatttgggccaagattcctcacacagatggcaactttcacccgtctcctttaatgggcggctttggacttaaacatccgcctcctcagatcctcatcaaaaacactcctgttcctgcggatcctccaacaacgttcaaccaggccaagctgaattctttcatcacgcagtacagcaccggacaagtcagcgtggagatcgagtgggagctgcagaaggagaacagcaagcgctggaacccagagattcagtatacttccaactactacaaatctacaaatgtggactttgctgttaatactgagggtgtttactctgagcctcgccccattggcactcgttacctcacccgtaatctg

SEQ ID NO: 916 - protein, 738 aa, Artificial Sequence
  source: /note="Description of Artificial Sequence: Synthetic polypeptide"
  VARIANT (158)..(158): /replace="Ser"
  VARIANT (169)..(169): /replace="Lys"
  VARIANT (315)..(315): /replace="Ser"
  VARIANT (413)..(413): /replace="Glu"
  VARIANT (472)..(472): /replace="Thr" or "Ser"
  VARIANT (534)..(534): /replace="Glu"
  VARIANT (542)..(542): /replace="Val"
  VARIANT (595)..(595): /replace="Val"
  SITE (1)..(738): /note="Variant residues given in the sequence have no preference with respect to those in the annotations for variant positions"
MAADGYLPDWLEDNLSEGIREWWDLKPGAPKPKANQQKQDDGRGLVLPGYKYLGPFNGLDKGEPVNAADAAALEHDKAYDQQLKAGDNPYLRYNHADAEFQERLQEDTSFGGNLGRAVFQAKKRVLEPLGLVEEGAKTAPGKKRPVEQSPQREPDSSTGIGKKGQQPAFKRLNFGQTGDSESVPDPQPLGEPPAAPSGVGSNTMAAGGGAPMADNNEGADGVGSSSGNWHCDSTWLGDRVITTSTRTWALPTYNNHLYKQISNGTSGGSTNDNTYFGYSTPWGYFDFNRFHCHFSPRDWQRLINNNWGFRPKRLNFKLFNIQVKEVTQNEGTKTIANNLTSTIQVFTDSEYQLPYVLGSAHQGCLPPFPADVFMIPQYGYLTLNNGSQAVGRSSFYCLEYFPSQMLRTGNNFQFSYTFEDVPFHSSYAHSQSLDRLMNPLIDQYLYYLSRTQTTGGTAGTQTLQFSQAGPSNMANQAKNWLPGPCYRQQRVSTTTSQNNNSNFAWTGATKYHLNGRDSLVNPGVAMATHKDDEDRFFPSSGILIFGKQGAGKDNVDYSNVMLTSEEEIKTTNPVATEEYGVVADNLQQQNTAPQIGTVNSQGALPGMVWQNRDVYLQGPIWAKIPHTDGNFHPSPLMGGFGLKHPPPQILIKNTPVPADPPTTFNQAKLNSFITQYSTGQVSVEIEWELQKENSKRWNPEIQYTSNYYKSTNVDFAVNTEGVYSEPRPIGTRYLTRNL

SEQ ID NO: 917 - DNA, 2214 bp, Artificial Sequence
  source: /note="Description of Artificial Sequence: Synthetic polynucleotide"
  Variation (472)..(474): /replace="agc"
  Variation (505)..(507): /replace="aag"
  Variation (943)..(945): /replace="agc"
  Variation (1237)..(1239): /replace="gaa"
  Variation (1414)..(1416): /replace="agc"
  Variation (1600)..(1602): /replace="gag"
  Variation (1624)..(1626): /replace="gtc"
  Variation (1783)..(1785): /replace="gta"
  misc_feature (1)..(2214): /note="Variant nucleotides given in the sequence have no preference with respect to those in the annotations for variant positions"
atggctgccgatggttatcttccagattggctcgaggacaacctctctgagggcattcgcgagtggtgggacctgaaacctggagccccgaaacccaaagccaaccagcaaaagcaggacgacggccggggtctggtgcttcctggctacaagtacctcggacccttcaacggactcgacaagggggagcccgtcaacgcggcggacgcagcggccctcgagcacgacaaggcctacgaccagcagctcaaagcgggtgacaatccgtacctgcggtataatcacgccgacgccgagtttcaggagcgtctgcaagaagatacgtcttttgggggcaacctcgggcgagcagtcttccaggccaagaagcgggttctcgaacctctcggtctggttgaggaaggcgctaagacggctcctggaaagaagagaccggtagagcagtcaccacagcgtgagcccgactcctccacgggcatcggcaagaaaggccagcagcccgccagaaagagactcaatttcggtcagactggcgactcagagtcagtccccgaccctcaacctctcggagaacctccagcagcgccctctggtgtgggatctaatacaatggctgcaggcggtggcgcaccaatggcagacaataacgaaggtgccgacggagtgggtagttcctcgggaaattggcattgcgattccacatggctgggcgacagagtcatcaccaccagcacccgaacctgggccctgcccacctacaacaaccacctctacaagcaaatctccaacgggacctcgggaggcagcaccaacgacaacacctactttggctacagcaccccctgggggtattttgactttaacagattccactgccacttctcaccacgtgactggcagcgactcatcaacaacaactggggattccggcccaagagactcaacttcaagctcttcaacatccaggtcaaagaggtcacgcagaatgaaggcaccaagaccatcgccaataacctcaccagcaccatccaggtgtttacggactcggaataccagctgccgtacgtcctcggctctgcccaccagggctgcctgcctccgttcccggcggacgtcttcatgattcctcagtacggctacctgactctcaacaacggtagtcaggccgtgggacgttcctccttctactgcctggagtacttcccctctcagatgctgagaacgggcaacaactttcaattcagctacactttcgaggacgtgcctttccacagcagctacgcgcacagccagagtttggacaggctgatgaatcctctcatcgaccagtacctgtactacctgtcaagaacccagactacgggaggcacagcgggaacccagacgttgcagttttctcaggccgggcctagcaacatggcgaatcaggccaaaaactggctgcctggaccctgctacagacagcagcgcgtctccacgacaacgtcgcaaaacaacaacagcaactttgcctggactggtgccaccaagtatcatctgaacggcagagactctctggtgaatccgggcgtcgccatggcaacccacaaggacgacgaggaccgcttcttcccatccagcggcatcctcatatttggcaagcagggagctggaaaagacaacgtggactatagcaacgtgatgctaaccagcgaggaagaaatcaagaccaccaaccccgtggccacagaagagtatggcgtggtggctgataacctacagcagcaaaacaccgctcctcaaatagggaccgtcaacagccagggagccttacctggcatggtctggcagaaccgggacgtgtacctgcagggtcctatttgggccaagattcctcacacagatggcaactttcacccgtctcctttaatgggcggctttggacttaaacatccgcctcctcagatcctcatcaaaaacactcctgttcctgcggatcctccaacaacgttcaaccaggccaagctgaattctttcatcacgcagtacagcaccggacaagtcagcgtggagatcgagtgggagctgcagaaggagaacagcaagcgctggaacccagagattcagtatacttccaactactacaaatctacaaatgtggactttgctgttaatactgagggtgtttactctgagcctcgccccattggcactcgttacctcacccgtaatctg

SEQ ID NO: 918 - protein, 738 aa, Artificial Sequence
  source: /note="Description of Artificial Sequence: Synthetic polypeptide"
  VARIANT (169)..(169): /replace="Lys"
  VARIANT (315)..(315): /replace="Ser"
  VARIANT (534)..(534): /replace="Glu"
  VARIANT (542)..(542): /replace="Val"
  SITE (1)..(738): /note="Variant residues given in the sequence have no preference with respect to those in the annotations for variant positions"
MAADGYLPDWLEDNLSEGIREWWDLKPGAPKPKANQQKQDDGRGLVLPGYKYLGPFNGLDKGEPVNAADAAALEHDKAYDQQLKAGDNPYLRYNHADAEFQERLQEDTSFGGNLGRAVFQAKKRVLEPLGLVEEGAKTAPGKKRPVEPSPQRSPDSSTGIGKKGQQPARKRLNFGQTGDSESVPDPQPIGEPPAAPSGVGSGTMAAGGGAPMADNNEGADGVGSSSGNWHCDSTWLGDRVITTSTRTWALPTYNNHLYKQISNGTSGGSTNDNTYFGYSTPWGYFDFNRFHCHFSPRDWQRLINNNWGFRPKRLNFKLFNIQVKEVTQNEGTKTIANNLTSTIQVFTDSEYQLPYVLGSAHQGCLPPFPADVFMIPQYGYLTLNNGSQAVGRSSFYCLEYFPSQMLRTGNNFEFSYTFEDVPFHSSYAHSQSLDRLMNPLIDQYLYYLSRTQSTGGTAGTQQLLFSQAGPSNMSAQAKNWLPGPCYRQQRVSTTLSQNNNSNFAWTGATKYHLNGRDSLVNPGVAMATHKDDEDRFFPSSGILMFGKQGAGKDNVDYSNVMLTSEEEIKTTNPVATEQYGVVADNLQQQNTAPIVGAVNSQGALPGMVWQNRDVYLQGPIWAKIPHTDGNFHPSPLMGGFGLKHPPPQILIKNTPVPADPPTTFNQAKLNSFITQYSTGQVSVEIEWELQKENSKRWNPEIQYTSNYYKSTNVDFAVNTEGVYSEPRPIGTRYLTRNL

SEQ ID NO: 919 - DNA, 2214 bp, Artificial Sequence
  source: /note="Description of Artificial Sequence: Synthetic polynucleotide"
  Variation (505)..(507): /replace="aaa"
  Variation (943)..(945): /replace="agc"
  Variation (1600)..(1602): /replace="gag"
  Variation (1624)..(1626): /replace="gtc"
  misc_feature (1)..(2214): /note="Variant nucleotides given in the sequence have no preference with respect to those in the annotations for variant positions"
atggctgccgatggttatcttccagattggctcgaggacaacctctctgagggcattcgcgagtggtgggacctgaaacctggagccccgaaacccaaagccaaccagcaaaagcaggacgacggccggggtctggtgcttcctggctacaagtacctcggacccttcaacggactcgacaagggggagcccgtcaacgcggcggacgcagcggccctcgagcacgacaaggcctacgaccagcagctcaaagcgggtgacaatccgtacctgcggtataatcacgccgacgccgagtttcaggagcgtctgcaagaagatacgtcttttgggggcaacctcgggcgagcagtcttccaggccaagaagcgggttctcgaacctctcggtctggttgaggaaggcgctaagacggctcctggaaagaagagaccggtagagccgtcaccacagcgttcccccgactcctccacgggcatcggcaagaaaggccagcagcccgccagaaagagactcaatttcggtcagactggcgactcagagtcagtccccgaccctcaacctatcggagaacctccagcagcgccctctggtgtgggatctggtacaatggctgcaggcggtggcgcaccaatggcagacaataacgaaggtgccgacggagtgggtagttcctcgggaaattggcattgcgattccacatggctgggcgacagagtcatcaccaccagcacccgaacctgggccctgcccacctacaacaaccacctctacaagcaaatctccaacgggacctcgggaggcagcaccaacgacaacacctactttggctacagcaccccctgggggtattttgactttaacagattccactgccacttctcaccacgtgactggcagcgactcatcaacaacaactggggattccggcccaagagactcaacttcaagctcttcaacatccaggtcaaagaggtcacgcagaatgaaggcaccaagaccatcgccaataacctcaccagcaccatccaggtgtttacggactcggaataccagctgccgtacgtcctcggctctgcccaccagggctgcctgcctccgttcccggcggacgtcttcatgattcctcagtacggctacctgactctcaacaacggtagtcaggccgtgggacgttcctccttctactgcctggagtacttcccctctcagatgctgagaacgggcaacaactttgagttcagctacactttcgaggacgtgcctttccacagcagctacgcgcacagccagagtttggacaggctgatgaatcctctcatcgaccagtacctgtactacctgtcaagaacccagtctacgggaggcacagcgggaacccagcagttgctgttttctcaggccgggcctagcaacatgtcggctcaggccaaaaactggctgcctggaccctgctacagacagcagcgcgtctccacgacactgtcgcaaaacaacaacagcaactttgcctggactggtgccaccaagtatcatctgaacggcagagactctctggtgaatccgggcgtcgccatggcaacccacaaggacgacgaggaccgcttcttcccatccagcggcatcctcatgtttggcaagcagggagctggaaaagacaacgtggactatagcaacgtgatgctaaccagcgaggaagaaatcaagaccaccaaccccgtggccacagaacagtatggcgtggtggctgataacctacagcagcaaaacaccgctcctattgtgggggccgtcaacagccagggagccttacctggcatggtctggcagaaccgggacgtgtacctgcagggtcctatttgggccaagattcctcacacagatggcaactttcacccgtctcctttaatgggcggctttggacttaaacatccgcctcctcagatcctcatcaaaaacactcctgttcctgcggatcctccaacaacgttcaaccaggccaagctgaattctttcatcacgcagtacagcaccggacaagtcagcgtggagatcgagtgggagctgcagaaggagaacagcaagcgctggaacccagagattcagtatacttccaactactacaaatctacaaatgtggactttgctgttaatactgagggtgtttactctgagcctcgccccattggcactcgttacctcacccgtaatctg

SEQ ID NO: 920 - protein, 738 aa, Artificial Sequence
  source: /note="Description of Artificial Sequence: Synthetic polypeptide"
  VARIANT (471)..(471): /replace="Asn"
  SITE (1)..(738): /note="Variant residues given in the sequence have no preference with respect to those in the annotations for variant positions"
MAADGYLPDWLEDNLSEGIREWWDLKPGAPKPKANQQKQDDGRGLVLPGYKYLGPFNGLDKGEPVNAADAAALEHDKAYDQQLKAGDNPYLRYNHADAEFQERLQEDTSFGGNLGRAVFQAKKRVLEPLGLVEEGAKTAPGKKRPVEPSPQRSPDSSTGIGKKGQQPAKKRLNFGQTGDSESVPDPQPIGEPPAGPSGLGSGTMAAGGGAPMADNNEGADGVGSSSGNWHCDSTWLGDRVITTSTRTWALPTYNNHLYKQISNGTSGGSTNDNTYFGYSTPWGYFDFNRFHCHFSPRDWQRLINNNWGFRPKRLNFKLFNIQVKEVTQNEGTKTIANNLTSTIQVFTDSEYQLPYVLGSAHQGCLPPFPADVFMIPQYGYLTLNNGSQAVGRSSFYCLEYFPSQMLRTGNNFEFSYTFEDVPFHSSYAHSQSLDRLMNPLIDQYLYYLSRTQSTGGTAGTQQLLFSQAGPSNMSAQAKNWLPGPCYRQQRVSTTLSQNNNSNFAWTGATKYHLNGRDSLVNPGVAMATHKDDEERFFPSSGVLMFGKQGAGKDNVDYSSVMLTSEEEIKTTNPVATEQYGVVADNLQQQNTAPIVGAVNSQGALPGMVWQNRDVYLQGPIWAKIPHTDGNFHPSPLMGGFGLKHPPPQILIKNTPVPADPPTTFSQAKLASFITQYSTGQVSVEIEWELQKENSKRWNPEIQYTSNYYKSTNVDFAVNTEGTYSEPRPIGTRYLTRNL

SEQ ID NO: 921 - DNA, 2214 bp, Artificial Sequence
  source: /note="Description of Artificial Sequence: Synthetic polynucleotide"
  Variation (1411)..(1413): /replace="aat"
  misc_feature (1)..(2214): /note="Variant nucleotides given in the sequence have no preference with respect to those in the annotations for variant positions"
atggctgccgatggttatcttccagattggctcgaggacaacctctctgagggcattcgcgagtggtgggacttgaaacctggagccccgaaacccaaagccaaccagcaaaagcaggacgacggccggggtctggtgcttcctggctacaagtacctcggacccttcaacggactcgacaagggggagcccgtcaacgcggcggacgcagcggccctcgagcacgacaaggcctacgaccagcagctcaaagcgggtgacaatccgtacctgcggtataaccacgccgacgccgagtttcaggagcgtctgcaagaagatacgtcttttgggggcaacctcgggcgagcagtcttccaggccaagaagcgggttctcgaacctctcggtctggttgaggaaggcgctaagacggctcctggaaagaagagaccggtagagccatcaccccagcgttctccagactcctctacgggcatcggcaagaaaggccagcagcccgcgaaaaagagactcaactttgggcagactggcgactcagagtcagtgcccgaccctcaaccaatcggagaaccccccgcaggcccctctggtctgggatctggtacaatggctgcaggcggtggcgctccaatggcagacaataacgaaggcgccgacggagtgggtagttcctcaggaaattggcattgcgattccacatggctgggcgacagagtcatcaccaccagcacccgaacctgggccctccccacctacaacaaccacctctacaagcaaatctccaacgggacttcgggaggaagcaccaacgacaacacctacttcggctacagcaccccctgggggtattttgactttaacagattccactgccacttctcaccacgtgactggcagcgactcatcaacaacaactggggattccggcccaagagactcaacttcaagctcttcaacatccaggtcaaggaggtcacgcagaatgaaggcaccaagaccatcgccaataaccttaccagcacgattcaggtctttacggactcggaataccagctcccgtacgtcctcggctctgcgcaccagggctgcctgcctccgttcccggcggacgtcttcatgattcctcagtacgggtacctgactctgaacaatggcagtcaggccgtgggccgttcctccttctactgcctggagtactttccttctcaaatgctgagaacgggcaacaactttgagttcagctacacgtttgaggacgtgccttttcacagcagctacgcgcacagccaaagcctggaccggctgatgaaccccctcatcgaccagtacctgtactacctgtctcggactcagtccacgggaggtaccgcaggaactcagcagttgctattttctcaggccgggcctagtaacatgtcggctcaggccaaaaactggctacccgggccctgctaccggcagcaacgcgtctccacgacactgtcgcaaaataacaacagcaactttgcctggaccggtgccaccaagtatcatctgaatggcagagactctctggtaaatcccggtgtcgctatggcaacccacaaggacgacgaagagcgattttttccgtccagcggagtcttaatgtttgggaaacagggagctggaaaagacaacgtggactatagcagcgttatgctaaccagtgaggaagaaattaaaaccaccaacccagtggccacagaacagtacggcgtggtggccgataacctgcaacagcaaaacaccgctcctattgtaggggccgtcaacagtcaaggagccttacctggcatggtctggcagaaccgggacgtgtacctgcagggtcctatctgggccaagattcctcacacggacggaaactttcatccctcgccgctgatgggaggctttggactgaaacacccgcctcctcagatcctgattaagaatacacctgttcccgcggatcctccaactaccttcagtcaagctaagctggcgtcgttcatcacgcagtacagcaccggacaggtcagcgtggaaattgaatgggagctgcagaaagaaaacagcaaacgctggaacccagagattcaatacacttccaactactacaaatctacaaatgtggactttgctgttaacacagaaggcacttattctgagcctcgccccatcggcacccgttacctcacccgtaatctg

SEQ ID NO: 922 - protein, 737 aa, Artificial Sequence
  source: /note="Description of Artificial Sequence: Synthetic polypeptide"
  VARIANT (148)..(148): /replace="Gln"
  VARIANT (169)..(169): /replace="Arg"
  VARIANT (314)..(314): /replace="Asn"
  VARIANT (466)..(466): /replace="His"
  VARIANT (563)..(563): /replace="Ser"
  VARIANT (580)..(580): /replace="Ile"
  VARIANT (588)..(588): /replace="Ser"
  SITE (1)..(737): /note="Variant residues given in the sequence have no preference with respect to those in the annotations for variant positions"
MAADGYLPDWLEDNLSEGIREWWDLKPGAPKPKANQQKQDDGRGLVLPGYKYLGPFNGLDKGEPVNAADAAALEHDKAYDQQLKAGDNPYLRYNHADAEFQERLQEDTSFGGNLGRAVFQAKKRVLEPLGLVEEGAKTAPGKKRPVEPSPQRSPDSSTGIGKKGQQPAKKRLNFGQTGDSESVPDPQPLGEPPAAPSGVGSGTMAAGGGAPMADNNEGADGVGNASGNWHCDSTWLGDRVITTSTRTWALPTYNNHLYKQISSQSAGSTNDNTYFGYSTPWGYFDFNRFHCHFSPRDWQRLINNNWGFRPKKLRFKLFNIQVKEVTTNDGVTTIANNLTSTVQVFSDSEYQLPYVLGSAHQGCLPPFPADVFMIPQYGYLTLNNGSQSVGRSSFYCLEYFPSQMLRTGNNFEFSYTFEDVPFHSSYAHSQSLDRLMNPLIDQYLYYLARTQSTTGGTAGNRELQFYQAGPSTMAEQAKNWLPGPCYRQQRVSKTLDQNNNSNFAWTGATKYHLNGRNSLVNPGVAMATHKDDEDRFFPSSGVLIFGKTGAANKTTLENVLMTNEEEIKTTNPVATEEYGVVSSNLQSANTAPQTQTVNSQGALPGMVWQNRDVYLQGPIWAKIPHTDGNFHPSPLMGGFGLKHPPPQILIKNTPVPANPPEVFTPAKFASFITQYSTGQVSVEIEWELQKENSKRWNPEIQYTSNYDKSTNVDFAVDSEGVYSEPRPIGTRYLTRNL

SEQ ID NO: 923 - DNA, 2211 bp, Artificial Sequence
  source: /note="Description of Artificial Sequence: Synthetic polynucleotide"
  Variation (442)..(444): /replace="cag"
  Variation (505)..(507): /replace="aga"
  Variation (940)..(942): /replace="aac"
  Variation (1396)..(1398): /replace="cac"
  Variation (1687)..(1689): /replace="agt"
  Variation (1738)..(1740): /replace="ata"
  Variation (1762)..(1764): /replace="tct"
  misc_feature (1)..(2211): /note="Variant nucleotides given in the sequence have no preference with respect to those in the annotations for variant positions"
atggctgccgatggttatcttccagattggctcgaggacaacctctctgagggcattcgcgagtggtgggacctgaaacctggagccccgaaacccaaagccaaccagcaaaagcaggacgacggccggggtctggtgcttcctggctacaagtacctcggacccttcaacggactcgacaagggggagcccgtcaacgcggcggacgcagcggccctcgagcacgacaaggcctacgaccagcagctcaaagcgggtgacaatccgtacctgcggtataaccacgccgacgccgagtttcaggagcgtctgcaagaagatacgtcatttgggggcaacctcgggcgagcagtcttccaggccaagaagcgggttctcgaacctctcggtctggttgaggaaggcgctaagacggctcctggaaagaagagaccggtagagccgtcacctcagcgttcccccgactcctccacgggcatcggcaagaaaggccagcagcccgccaaaaagagactcaatttcggtcagactggcgactcagagtcagtccccgaccctcaacctctcggagaacctccagcagcgccctctggtgtgggatctggtacaatggctgcaggcggtggcgcaccaatggcagacaataacgaaggtgccgacggagtgggtaatgcctcaggaaattggcattgcgattccacatggctgggcgacagagtcattaccaccagcacccgaacctgggccctgcccacctacaacaaccacctctacaagcaaatctccagtcaaagtgcaggtagtaccaacgacaacacctacttcggctacagcaccccctgggggtattttgactttaacagattccactgccacttctcaccacgtgactggcagcgactcatcaacaacaactggggattccggcccaagaagctgcggttcaagctcttcaacatccaggtcaaggaggtcacgacgaatgacggcgttacgaccatcgctaataaccttaccagcacggttcaggtattctcggactcggaataccagctgccgtacgtcctcggctctgcgcaccagggctgcctgcctccgttcccggcggacgtcttcatgattcctcagtacggctacctgactctcaacaatggcagtcagtctgtgggacgttcctccttctactgcctggagtacttcccctctcagatgctgagaacgggcaacaactttgagttcagctacaccttcgaggacgtgcctttccacagcagctacgcacacagccagagcctggaccggctgatgaatcccctcatcgaccagtacttgtactacctggccagaacacagagtaccacaggaggcacagctggcaatcgggaactgcagttttaccaggccgggccttcaactatggccgaacaagccaagaattggttacctggaccttgctaccggcaacaaagagtctccaaaacgctggatcaaaacaacaacagcaactttgcttggactggtgccaccaaatatcacctgaacggcagaaactcgttggttaatcccggcgtcgccatggcaactcacaaggacgacgaggaccgctttttcccatccagcggagtcctgatttttggaaaaactggagcagctaacaaaactacattggaaaatgtgttaatgacaaatgaagaagaaattaaaactactaatcctgtagccacggaagaatacggggtagtcagcagcaacttacaatcggctaatactgcaccccagacacaaactgtcaacagccagggagccttacctggcatggtctggcagaaccgggacgtgtacctgcagggtcccatctgggccaagattcctcacacggatggcaactttcacccgtctcctttgatgggcggctttggacttaaacatccgcctcctcagatcctgatcaagaacactcccgttcccgctaatcctccggaggtgtttactcctgccaagtttgcttcgttcatcacacagtacagcaccggacaagtcagcgtggaaatcgagtgggagctgcagaaggaaaacagcaagcgctggaacccggagattcagtacacctccaactatgataagtcgactaatgtggactttgccgttgacagcgagggtgtttactctgagcctcgccctattggcactcgttacctcacccgtaatctg

SEQ ID NO: 924 - protein, 735 aa, Artificial Sequence
  source: /note="Description of Artificial Sequence: Synthetic polypeptide"
  VARIANT (162)..(162): /replace="Thr"
  VARIANT (168)..(168): /replace="Arg"
  VARIANT (224)..(224): /replace="Ser"
  VARIANT (310)..(310): /replace="Lys"
  VARIANT (410)..(410): /replace="Gln"
  VARIANT (446)..(446): /replace="Asn"
  VARIANT (461)..(461): /replace="Leu"
  VARIANT (471)..(471): /replace="Ser"
  VARIANT (708)..(708): /replace="Thr"
  SITE (1)..(735): /note="Variant residues given in the sequence have no preference with respect to those in the annotations for variant positions"
MAADGYLPDWLEDNLSEGIREWWDLKPGAPKPKANQQKQDDGRGLVLPGYKYLGPFNGLDKGEPVNAADAAALEHDKAYDQQLKAGDNPYLRYNHADAEFQERLQEDTSFGGNLGRAVFQAKKRVLEPLGLVEEGAKTAPGKKRPVEQSPQEPDSSSGIGKSGQQPAKKRLNFGQTGDSESVPDPQPLGEPPAAPSGVGSNTMASGGGAPMADNNEGADGVGNASGNWHCDSTWLGDRVITTSTRTWALPTYNNHLYKQISSQSGASNDNHYFGYSTPWGYFDFNRFHCHFSPRDWQRLINNNWGFRPKRLNFKLFNIQVKEVTTNDGTTTIANNLTSTVQVFTDSEYQLPYVLGSAHQGCLPPFPADVFMIPQYGYLTLNNGSQAVGRSSFYCLEYFPSQMLRTGNNFTFSYTFEDVPFHSSYAHSQSLDRLMNPLIDQYLYYLSRTQTTSGTAQNRELQFSQAGPSSMANQAKNWLPGPCYRQQRVSKTANDNNNSNFAWTGATKYHLNGRDSLVNPGPAMASHKDDEDKFFPMSGVLIFGKQGAGASNVDLDNVMITDEEEIKTTNPVATEQYGTVATNLQSSNTAPATGTVNSQGALPGMVWQDRDVYLQGPIWAKIPHTDGHFHPSPLMGGFGLKHPPPQILIKNTPVPANPPTTFSPAKFASFITQYSTGQVSVEIEWELQKENSKRWNPEIQYTSNYNKSANVDFTVDTNGVYSEPRPIGTRYLTRNL

SEQ ID NO: 925 - DNA, 2205 bp, Artificial Sequence
  source: /note="Description of Artificial Sequence: Synthetic polynucleotide"
  Variation (484)..(486): /replace="aca"
  Variation (502)..(504): /replace="aga"
  Variation (670)..(672): /replace="tcc"
  Variation (928)..(930): /replace="aaa"
  Variation (1228)..(1230): /replace="cag"
  Variation (1336)..(1338): /replace="aac"
  Variation (1381)..(1383): /replace="ctg"
  Variation (1411)..(1413): /replace="tct"
  Variation (2122)..(2124): /replace="acc"
  misc_feature (1)..(2205): /note="Variant nucleotides given in the sequence have no preference with respect to those in the annotations for variant positions"
atggctgccgatggttatcttccagattggctcgaggacaacctctctgagggcattcgcgagtggtgggacttgaaacctggagccccgaaacccaaagccaaccagcaaaagcaggacgacggccggggtctggtgcttcctggctacaagtacctcggacccttcaacggactcgacaagggggagcccgtcaacgcggcggatgcagcggccctcgagcacgacaaggcctacgaccagcagctcaaagcgggtgacaatccgtacctgcggtataaccacgccgacgccgagtttcaggagcgtctgcaagaagatacgtcttttgggggcaacctcgggcgagcagtcttccaggccaagaagagggttctcgaacctcttggtctggttgaggaaggtgctaagacggctcctggaaagaaacgtccggtagagcagtcgccacaagagccagactcctcctcgggcattggcaaggctggccagcagcccgctaaaaagagactcaattttggtcagactggcgactcagagtcagtccccgacccacaacctctcggagaacctccagcagccccctctggtgtgggatctaatacaatggcttcaggcggtggcgcaccaatggcagacaataacgaaggcgccgacggagtgggtaatgcctcaggaaattggcattgcgattccacatggctgggcgacagagtcatcaccaccagcacccgaacatgggccttgcccacctataacaaccacctctacaagcaaatctccagtcaatcaggggccagcaacgacaaccactacttcggctacagcaccccctgggggtattttgatttcaacagattccactgccatttctcaccacgtgactggcagcgactcatcaacaacaattggggattccggcccaagagactcaacttcaagctcttcaacatccaagtcaaggaggtcacgacgaatgatggcaccacgaccatcgctaataaccttaccagcacggttcaagtcttcacggactcggagtaccagttgccgtacgtcctcggctctgcgcaccagggctgcctccctccgttcccggcggacgtgttcatgattccgcagtacggctacctaacgctcaacaatggcagccaggcagtgggacggtcatccttttactgcctggaatatttcccatcgcagatgctgagaacgggcaataactttaccttcagctacaccttcgaggacgtgcctttccacagcagctacgcgcacagccagagcctggaccggctgatgaatcctctcatcgaccagtacctgtattacctgcaaagaactcagactacgtccggaactgcccaaaacagggagttgagttttagccaggcgggtccatctagcatggctaatcaggccaaaaactggctacctggaccctgttaccggcagcagcgcgtttctaaaacagcaaatgacaacaacaacagcaactttgcctggactggtgctacaaaatatcaccttaatgggcgtgattctttagtcaaccctggccctgctatggcctcacacaaagacgacgaagacaagttctttcccatgagcggtgtcttgatttttggaaagcagggcgccggagcttcaaacgttgatttggacaatgtcatgatcacagacgaagaggaaatcaaaaccactaaccccgtggccaccgaacaatatgggactgtggcaaccaatctccagagcagcaacacagcccctgcgaccggaactgtgaattctcagggagccttacctggaatggtgtggcaagacagagacgtatacctgcagggtcctatttgggccaaaattcctcacacggatggacactttcacccgtctcctctcatgggcggctttggacttaagcacccgcctcctcagatcctcatcaaaaacacgcctgttcctgcgaatcctccgacaacgttttcgcctgcaaagtttgcttcattcatcacccagtattccacaggacaagtgagcgtggagattgaatgggagctgcagaaagaaaacagcaaacgctggaatcccgaaatacagtatacatctaactataataaatctgccaacgttgatttcactgtggacaccaatggagtttatagtgagcctcgccccattggcacccgttacctcacccgtaacctg

SEQ ID NO: 926 - protein, 735 aa, Artificial Sequence
  source: /note="Description of Artificial Sequence: Synthetic polypeptide"
  VARIANT (42)..(42): /replace="Ser"
  VARIANT (168)..(168): /replace="Lys"
  VARIANT (310)..(310): /replace="Arg"
  VARIANT (410)..(410): /replace="Gln"
  VARIANT (446)..(446): /replace="Arg"
  VARIANT (461)..(461): /replace="Leu"
  VARIANT (471)..(471): /replace="Ser"
  VARIANT (475)..(475): /replace="Arg"
  VARIANT (504)..(504): /replace="Ala"
  VARIANT (539)..(539): /replace="Asn"
  SITE (1)..(735): /note="Variant residues given in the sequence have no preference with respect to those in the annotations for variant positions"
MAADGYLPDWLEDNLSEGIREWWDLKPGAPQPKANQQHQDDGRGLVLPGYKYLGPFNGLDKGEPVNEADAAALEHDKAYDQQLKAGDNPYLKYNHADAEFQERLQEDTSFGGNLGRAVFQAKKRVLEPLGLVEEAAKTAPGKKRPVEQSPQEPDSSSGIGKSGQQPARKRLNFGQTGDSESVPDPQPLGEPPAAPSGVGSNTMASGGGAPMADNNEGADGVGNSSGNWHCDSTWLGDRVITTSTRTWALPTYNNHLYKQISSQSGASNDNHYFGYSTPWGYFDFNRFHCHFSPRDWQRLINNNWGFRPKKLNFKLFNIQVKEVTQNDGTTTIANNLTSTVQVFTDSEYQLPYVLGSAHQGCLPPFPADVFMIPQYGYLTLNNGSQAVGRSSFYCLEYFPSQMLRTGNNFTFSYTFEDVPFHSSYAHSQSLDRLMNPLIDQYLYYLSRTQTTSGTTQQSRLQFSQAGPSSMAQQAKNWLPGPCYRQQRVSKTANDNNNSNFAWTGATKYHLNGRDSLVNPGPAMASHKDDEEKFFPMHGVLIFGKQGTGASNVDLDNVMITDEEEIRTTNPVATEQYGTVATNLQSSNTAPATGTVNSQGALPGMVWQDRDVYLQGPIWAKIPHTDGHFHPSPLMGGFGLKHPPPQILIKNTPVPANPPTTFSPAKFASFITQYSTGQVSVEIEWELQKENSKRWNPEIQYTSNYNKSVNVDFTVDTNGVYSEPRPIGTRYLTRNL

SEQ ID NO: 927 - DNA, 2205 bp, Artificial Sequence
  source: /note="Description of Artificial Sequence: Synthetic polynucleotide"
  Variation (124)..(126): /replace="agt"
  Variation (502)..(504): /replace="aaa"
  Variation (928)..(930): /replace="aga"
  Variation (1228)..(1230): /replace="cag"
  Variation (1336)..(1338): /replace="aga"
  Variation (1381)..(1383): /replace="ctc"
  Variation (1411)..(1413): /replace="tct"
  Variation (1423)..(1425): /replace="aga"
  Variation (1510)..(1512): /replace="gcg"
  Variation (1615)..(1617): /replace="gac"
  misc_feature (1)..(2205): /note="Variant nucleotides given in the sequence have no preference with respect to those in the annotations for variant positions"
atggctgctgacggttatcttccagattggctcgaggacaacctttctgaaggcattcgtgagtggtgggatctgaaacctggagcccctcaacccaaagcgaaccaacaacaccaggacgacggtcggggtcttgtgcttccgggttacaaatacctcggaccctttaacggactcgacaaaggagagccggtcaacgaggcggacgcggcagccctcgaacacgacaaagcttacgaccagcagctcaaggccggtgacaacccgtacctcaagtacaaccacgccgacgccgagtttcaggagcgtcttcaagaagatacgtcttttgggggcaaccttggcagagcagtcttccaggccaaaaagagggtccttgagcctcttggtctggttgaggaagcagctaaaacggctcctggaaagaagaggcctgtagaacagtctcctcaggaaccggactcatcatctggtattggcaaatcgggccaacagcctgccagaaaaagactaaatttcggtcagactggagactcagagtcagtcccagaccctcaacctctcggagaaccaccagcagccccctcaggtgtgggatctaatacaatggcttcaggcggtggcgcaccaatggcagacaataacgagggtgccgatggagtgggtaattcctcaggaaattggcattgcgattccacatggctgggcgacagagtcatcaccaccagcaccagaacctgggccctgcccacttacaacaaccatctctacaagcaaatctccagccaatcaggagcttcaaacgacaaccactactttggctacagcaccccttgggggtattttgactttaacagattccactgccacttctcaccacgtgactggcagcgactcattaacaacaactggggattccggcccaagaaactcaacttcaagctcttcaacatccaagttaaagaggtcacgcagaacgatggcacgacgactattgccaataaccttaccagcacggttcaagtgtttacggactcggagtatcagctcccgtacgtgctcgggtcggcgcaccaaggctgtctcccgccgtttccagcggacgtcttcatgatccctcagtatggatacctcaccctgaacaacggaagtcaagcggtgggacgctcatccttttactgcctggagtacttcccttcgcagatgctaaggactggaaataacttcacattcagctataccttcgaggatgtaccttttcacagcagctacgctcacagccagagtttggatcgcttgatgaatcctcttattgatcagtatctgtactacctgagcagaacgcaaacaacctctggaacaacccaacaatcacggctgcaatttagccaggctgggccttcgtctatggctcagcaggccgctaattggctacctgggccctgctaccggcaacagagagtttcaaagactgctaacgacaacaacaacagtaactttgcttggacaggggccaccaaatatcatctcaatggccgcgactcgctggtgaatccaggaccagctatggccagtcacaaggacgatgaagaaaaatttttccctatgcacggcttcctaatatttggcaaacaagggacaggggcaagtaacgtagatttagataatgtaatgattacggatgaagaagagattcgtaccaccaatcctgtggcaacagagcagtatggaactgtggcaactaacttgcagagctcaaatacagctcccgcgactggaactgtcaatagtcagggggccttacctggcatggtgtggcaagatcgtgacgtgtaccttcaaggacctatctgggcaaagattcctcacacggatggacactttcatccttctcctctgatgggaggctttggactgaaacatccgcctcctcaaatcttgatcaaaaatactccggtaccggcaaatcctccgacgactttcagcccggccaagtttgcttcatttatcactcagtactccactggacaggtcagcgtggaaattgagtgggagctacagaaagaaaacagcaaacgttggaatccagagattcagtacacttccaactacaacaagtctgttaatgtggactttactgtagacactaatggtgtttatagtgaacctcgccctattggaacccggtatctcacacgaaacttg

SEQ ID NO: 928 - protein, 736 aa, Artificial Sequence
  source: /note="Description of Artificial Sequence: Synthetic polypeptide"
MAADGYLPDWLEDNLSEGIREWWDLKPGAPKPKANQQKQDDGRGLVLPGYKYLGPFNGLDKGEPVNAADAAALEHDKAYDQQLKAGDNPYLRYNHADAEFQERLQEDTSFGGNLGRAVFQAKKRVLEPLGLVEEGAKTAPGKKRPVEQSPQEPDSSSGIGKKGQQPARKRLNFGQTGDSESVPDPQPLGEPPAAPSGVGSNTMAAGGGAPMADNNEGADGVGNASGNWHCDSTWLGDRVITTSTRTWALPTYNNHLYKQISSQSGGSTNDNTYFGYSTPWGYFDFNRFHCHFSPRDWQRLINNNWGFRPKRLNFKLFNIQVKEVTTNDGTTTIANNLTSTVQVFTDSEYQLPYVLGSAHQGCLPPFPADVFMIPQYGYLTLNNGSQAVGRSSFYCLEYFPSQMLRTGNNFEFSYTFEDVPFHSSYAHSQSLDRLMNPLIDQYLYYLSRTQTTSGTAGNRTLQFSQAGPSSMANQAKNWLPGPCYRQQRVSKTANQNNNSNFAWTGATKYHLNGRDSLVNPGPAMATHKDDEDKFFPMSGVLIFGKQGAGNSNVDLDNVMITNEEEIKTTNPVATEQYGTVATNLQSANTAPATGTVNSQGALPGMVWQDRDVYLQGPIWAKIPHTDGHFHPSPLMGGFGLKHPPPQILIKNTPVPANPPTTFSPAKFASFITQYSTGQVSVEIEWELQKENSKRWNPEIQYTSNYNKSTNVDFAVDTNGVYSEPRPIGTRYLTRNL

SEQ ID NO: 929 - protein, 736 aa, Artificial Sequence
  source: /note="Description of Artificial Sequence: Synthetic polypeptide"
MAADGYLPDWLEDNLSEGIREWWDLKPGAPKPKANQQKQDDGRGLVLPGYKYLGPFNGLDKGEPVNAADAAALEHDKAYDQQLKAGDNPYLRYNHADAEFQERLQEDTSFGGNLGRAVFQAKKRVLEPLGLVEEGAKTAPGKKRPVEQSPQEPDSSSGIGKKGQQPAKKRLNFGQTGDSESVPDPQPLGEPPAAPSGVGSNTMASGGGAPMADNNEGADGVGNASGNWHCDSTWLGDRVITTSTRTWALPTYNNHLYKQISSQSGASTNDNTYFGYSTPWGYFDFNRFHCHFSPRDWQRLINNNWGFRPKRLNFKLFNIQVKEVTTNDGTTTIANNLTSTVQVFTDSEYQLPYVLGSAHQGCLPPFPADVFMIPQYGYLTLNNGSQAVGRSSFYCLEYFPSQMLRTGNNFQFSYTFEDVPFHSSYAHSQSLDRLMNPLIDQYLYYLSRTQTTSGTAGNRELQFSQAGPSSMANQAKNWLPGPCYRQQRVSKTTNQNNNSNFAWTGATKYHLNGRDSLVNPGPAMATHKDDEDKFFPMSGVLIFGKQGAGNSNVDLDNVMITNEEEIKTTNPVATEEYGTVATNLQSANTAPATGTVNSQGALPGMVWQNRDVYLQGPIWAKIPHTDGHFHPSPLMGGFGLKHPPPQILIKNTPVPANPPTTFSPAKFASFITQYSTGQVSVEIEWELQKENSKRWNPEIQYTSNYNKSTNVDFAVDTNGVYSEPRPIGTRYLTRNL

SEQ ID NO: 930 - protein, 736 aa, Artificial Sequence
  source: /note="Description of Artificial Sequence: Synthetic polypeptide"
MAADGYLPDWLEDNLSEGIREWWDLKPGAPKPKANQQKQDDGRGLVLPGYKYLGPFNGLDKGEPVNAADAAALEHDKAYDQQLKAGDNPYLRYNHADAEFQERLQEDTSFGGNLGRAVFQAKKRVLEPLGLVEEGAKTAPGKKRPVEQSPQEPDSSSGIGKKGQQPARKRLNFGQTGDSESVPDPQPLGEPPAAPSGVGSNTMAAGGGAPMADNNEGADGVGNASGNWHCDSTWLGDRVITTSTRTWALPTYNNHLYKQISSQSGGSTNDNTYFGYSTPWGYFDFNRFHCHFSPRDWQRLINNNWGFRPKRLNFKLFNIQVKEVTTNDGTTTIANNLTSTVQVFTDSEYQLPYVLGSAHQGCLPPFPADVFMIPQYGYLTLNNGSQAVGRSSFYCLEYFPSQMLRTGNNFEFSYTFEDVPFHSSYAHSQSLDRLMNPLIDQYLYYLSRTQTTSGTAGNRELQFSQAGPSSMANQAKNWLPGPCYRQQRVSKTTNQNNNSNFAWTGATKYHLNGRDSLVNPGPAMATHKDDEDKFFPMSGVLIFGKQGAGNSNVDLDNVMITSEEEIKTTNPVATEEYGTVATNLQSSNTAPATGTVNSQGALPGMVWQERDVYLQGPIWAKIPHTDGHFHPSPLMGGFGLKHPPPQILIKNTPVPANPPTTFSPAKFASFITQYSTGQVSVEIEWELQKENSKRWNPEIQYTSNYNKSTNVDFAVDTNGVYSEPRPIGTRYLTRNL

SEQ ID NO: 931 - protein, 736 aa, Artificial Sequence
  source: /note="Description of Artificial Sequence: Synthetic polypeptide"
MAADGYLPDWLEDNLSEGIREWWDLKPGAPKPKANQQKQDDGRGLVLPGYKYLGPFNGLDKGEPVNAADAAALEHDKAYDQQLKAGDNPYLRYNHADAEFQERLQEDTSFGGNLGRAVFQAKKRVLEPLGLVEEGAKTAPGKKRPVEQSPQEPDSSSGIGKKGQQPARKRLNFGQTGDSESVPDPQPLGEPPAAPSGVGSNTMASGGGAPMADNNEGADGVGNASGNWHCDSTWLGDRVITTSTRTWALPTYNNHLYKQISSQSGGSTNDNTYFGYSTPWGYFDFNRFHCHFSPRDWQRLINNNWGFRPKKLNFKLFNIQVKEVTTNDGTTTIANNLTSTVQVFTDSEYQLPYVLGSAHQGCLPPFPADVFMIPQYGYLTLNNGSQAVGRSSFYCLEYFPSQMLRTGNNFEFSYTFEDVPFHSSYAHSQSLDRLMNPLIDQYLYYLSRTQTTSGTAGNRELQFSQAGPSSMANQAKNWLPGPCYRQQRVSKTTNQNNNSNFAWTGATKYHLNGRDSLVNPGPAMATHKDDEDKFFPMSGVLIFGKQGAGNSNVDLDNVMITSEEEIKTTNPVATEEYGTVATNLQSANTAPATGTVNSQGALPGMVWQDRDVYLQGPIWAKIPHTDGHFHPSPLMGGFGLKHPPPQILIKNTPVPANPPTTFSPAKFASFITQYSTGQVSVEIEWELQKENSKRWNPEIQYTSNYNKSTNVDFAVDTNGVYSEPRPIGTRYLTRNL

SEQ ID NO: 932 - protein, 736 aa, Artificial Sequence
  source: /note="Description of Artificial Sequence: Synthetic polypeptide"
MAADGYLPDWLEDNLSEGIREWWDLKPGAPKPKANQQKQDDGRGLVLPGYKYLGPFNGLDKGEPVNAADAAALEHDKAYDQQLKAGDNPYLRYNHADAEFQERLQEDTSFGGNLGRAVFQAKKRVLEPLGLVEEGAKTAPGKKRPVEQSPQEPDSSSGIGKKGQQPARKRLNFGQTGDSESVPDPQPLGEPPAAPSGVGSNTMAAGGGAPMADNNEGADGVGNASGNWHCDSTWLGDRVITTSTRTWALPTYNNHLYKQISSQSGGSTNDNTYFGYSTPWGYFDFNRFHCHFSPRDWQRLINNNWGFRPKKLNFKLFNIQVKEVTTNDGTTTIANNLTSTVQVFTDSEYQLPYVLGSAHQGCLPPFPADVFMIPQYGYLTLNNGSQAVGRSSFYCLEYFPSQMLRTGNNFQFSYTFEDVPFHSSYAHSQSLDRLMNPLIDQYLYYLSRTQTTSGTAGNRTLQFSQAGPSSMANQAKNWLPGPCYRQQRVSKTTNQNNNSNFAWTGATKYHLNGRDSLVNPGPAMATHKDDEDKFFPMSGVLIFGKQGAGNSNVDLDNVMITNEEEIKTTNPVATEEYGTVATNLQSANTAPATGTVNSQGALPGMVWQDRDVYLQGPIWAKIPHTDGHFHPSPLMGGFGLKHPPPQILIKNTPVPANPPTTFSPAKFASFITQYSTGQVSVEIEWELQKENSKRWNPEIQYTSNYNKSTNVDFAVDTNGVYSEPRPIGTRYLTRNL

SEQ ID NO: 933 - protein, 736 aa, Artificial Sequence
  source: /note="Description of Artificial Sequence: Synthetic polypeptide"
MAADGYLPDWLEDNLSEGIREWWDLKPGAPKPKANQQKQDDGRGLVLPGYKYLGPFNGLDKGEPVNAADAAALEHDKAYDQQLKAGDNPYLRYNHADAEFQERLQEDTSFGGNLGRAVFQAKKRVLEPLGLVEEGAKTAPGKKRPVEQSPQEPDSSSGIGKKGQQPAKKRLNFGQTGDSESVPDPQPLGEPPAAPSGVGSNTMAAGGGAPMADNNEGADGVGNASGNWHCDSTWLGDRVITTSTRTWALPTYNNHLYKQISSQSGGSTNDNTYFGYSTPWGYFDFNRFHCHFSPRDWQRLINNNWGFRPKKLNFKLFNIQVKEVTTNDGTTTIANNLTSTVQVFTDSEYQLPYVLGSAHQGCLPPFPADVFMIPQYGYLTLNNGSQAVGRSSFYCLEYFPSQMLRTGNNFEFSYTFEDVPFHSSYAHSQSLDRLMNPLIDQYLYYLSRTQTTSGTAGNRTLQFSQAGPSSMANQAKNWLPGPCYRQQRVSKTANQNNNSNFAWTGATKYHLNGRDSLVNPGPAMATHKDDEDKFFPMSGVLIFGKQGAGNSNVDLDNVMITSEEEIKTTNPVATEQYGTVATNLQSSNTAPATGTVNSQGALPGMVWQNRDVYLQGPIWAKIPHTDGHFHPSPLMGGFGLKHPPPQILIKNTPVPANPPTTFSPAKFASFITQYSTGQVSVEIEWELQKENSKRWNPEIQYTSNYNKSTNVDFAVDTNGVYSEPRPIGTRYLTRNL

SEQ ID NO: 934 - protein, 736 aa, Artificial Sequence
  source: /note="Description of Artificial Sequence: Synthetic polypeptide"
MAADGYLPDWLEDNLSEGIREWWDLKPGAPKPKANQQKQDDGRGLVLPGYKYLGPFNGLDKGEPVNAADAAALEHDKAYDQQLKAGDNPYLRYNHADAEFQERLQEDTSFGGNLGRAVFQAKKRVLEPLGLVEEGAKTAPGKKRPVEQSPQEPDSSSGIGKKGQQPAKKRLNFGQTGDSESVPDPQPLGEPPAAPSGVGSNTMASGGGAPMADNNEGADGVGNASGNWHCDSTWLGDRVITTSTRTWALPTYNNHLYKQISSQSGGSTNDNTYFGYSTPWGYFDFNRFHCHFSPRDWQRLINNNWGFRPKKLNFKLFNIQVKEVTTNDGTTTIANNLTSTVQVFTDSEYQLPYVLGSAHQGCLPPFPADVFMIPQYGYLTLNNGSQAVGRSSFYCLEYFPSQMLRTGNNFEFSYTFEDVPFHSSYAHSQSLDRLMNPLIDQYLYYLSRTQTTSGTAGNRTLQFSQAGPSSMANQAKNWLPGPCYRQQRVSKTANQNNNSNFAWTGATKYHLNGRDSLVNPGPAMATHKDDEDKFFPMSGVLIFGKQGAGNSNVDLDNVMITSEEEIKTTNPVATEEYGTVATNLQSSNTAPATGTVNSQGALPGMVWQNRDVYLQGPIWAKIPHTDGHFHPSPLMGGFGLKHPPPQILIKNTPVPANPPTTFSPAKFASFITQYSTGQVSVEIEWELQKENSKRWNPEIQYTSNYNKSTNVDFAVDTNGVYSEPRPIGTRYLTRNL

SEQ ID NO: 935 - protein, 736 aa, Artificial Sequence
  source: /note="Description of Artificial Sequence: Synthetic polypeptide"
MAADGYLPDWLEDNLSEGIREWWDLKPGAPKPKANQQKQDDGRGLVLPGYKYLGPFNGLDKGEPVNAADAAALEHDKAYDQQLKAGDNPYLRYNHADAEFQERLQEDTSFGGNLGRAVFQAKKRVLEPLGLVEEGAKTAPGKKRPVEQSPQEPDSSSGIGKKGQQPAKKRLNFGQTGDSESVPDPQPLGEPPAAPSGVGSNTMASGGGAPMADNNEGADGVGNASGNWHCDSTWLGDRVITTSTRTWALPTYNNHLYKQISSQSGGSTNDNTYFGYSTPWGYFDFNRFHCHFSPRDWQRLINNNWGFRPKKLNFKLFNIQVKEVTTNDGTTTIANNLTSTVQVFTDSEYQLPYVLGSAHQGCLPPFPADVFMIPQYGYLTLNNGSQAVGRSSFYCLEYFPSQMLRTGNNFQFSYTFEDVPFHSSYAHSQSLDRLMNPLIDQYLYYLSRTQTTSGTAGNRELQFSQAGPSSMANQAKNWLPGPCYRQQRVSKTTNQNNNSNFAWTGATKYHLNGRDSLVNPGPAMATHKDDEDKFFPMSGVLIFGKQGAGNSNVDLDNVMITNEEEIKTTNPVATEQYGTVATNLQSANTAPATGTVNSQGALPGMVWQDRDVYLQGPIWAKIPHTDGHFHPSPLMGGFGLKHPPPQILIKNTPVPANPPTTFSPAKFASFITQYSTGQVSVEIEWELQKENSKRWNPEIQYTSNYNKSTNVDFAVDTNGVYSEPRPIGTRYLTRNL

SEQ ID NO: 936 - DNA, 2211 bp, Artificial Sequence
  source: /note="Description of Artificial Sequence: Synthetic polynucleotide"
atggctgccgatggttatcttccagattggctcgaggacaacctctctgagggcattcgcgagtggtgggacttgaaacctggagccccgaaacccaaagccaaccagcaaaagcaggacgacggccggggtctggtgcttcctggctacaagtacctcggacccttcaacggactcgacaagggggagcccgtcaacgcggcggacgcagcggccctcgagcacgacaaggcctacgaccagcagctcaaagcgggtgacaatccgtacctgcggtataaccacgccgacgccgagtttcaggagcgtctgcaagaagatacgtcttttgggggcaacctcgggcgagcagtcttccaggccaagaagcgggttctcgaacctctcggtctggttgaggaaggcgctaagacggctcctggaaagaagagaccggtagagcaatcaccccaggaaccagactcctcttcgggcatcggcaagaaaggccagcagcccgcgaaaaagagactcaactttgggcagacaggcgactcagagtcagtgcccgaccctcaaccactcggagaaccccccgcagccccctctggtgtgggatctaatacaatggctgcaggcggtggcgctccaatggcagacaataacgaaggcgccgacggagtgggtaacgcctcaggaaattggcattgcgattccacatggctgggcgacagagtcatcaccaccagcacccgaacctgggccctccccacctacaacaaccacctctacaagcaaatctccagccaatcgggagcaagcaccaacgacaacacctacttcggctacagcaccccctgggggtattttgactttaacagattccactgccacttctcaccacgtgactggcagcgactcatcaacaacaactggggattccggcccaagagactcaacttcaagctcttcaacatccaggtcaaggaggtcacgacgaatgatggcaccacgaccatcgccaataaccttaccagcacggttcaggtctttacggactcggaataccagctcccgtacgtcctcggctctgcgcaccagggctgcctgcctccgttcccggcggacgtcttcatgattcctcagtacgggtacctgactctgaacaatggcagtcaggccgtgggccgttcctccttctactgcctggagtactttccttctcaaatgctgagaacgggcaacaactttgagttcagctacacgtttgaggacgtgccttttcacagcagctacgcgcacagccaaagcctggaccggctgatgaaccccctcatcgaccagtacctgtactacctgtctcggactcagaccacgagtggtaccgcaggaaatcggacgttgcaattttctcaggccgggcctagtagcatggcgaatcaggccaaaaactggctacccgggccctgctaccggcagcaacgcgtctccaagacagcgaatcaaaataacaacagcaactttgcctggaccggtgccaccaagtatcatctgaatggcagagactctctggtaaatcccggtcccgctatggcaacccacaaggacgacgaagacaaattttttccgatgagcggagtcttaatatttgggaaacagggagctggaaatagcaacgtggaccttgacaacgttatgataaccagtgaggaagaaattaaaaccaccaacccagtggccacagaacagtacggcacggtggccactaacctgcaatcgtcaaacaccgctcctgctacagggaccgtcaacagtcaaggagccttacctggcatggtctggcagaaccgggacgtgtacctgcagggtcctatctgggccaagattcctcacacggacggacactttcatccctcgccgctgatgggaggctttggactgaaacacccgcctcctcagatcctgattaagaatacacctgttcccgcgaatcctccaactaccttcagtccagctaagtttgcgtcgttcatcacgcagtacagcaccggacaggtcagcgtggaaattgaatgggagctgcagaaagaaaacagcaaacgctggaacccagagattcaatacacttccaactacaacaaatctacaaatgtggactttgctgttgacacaaatggcgtttattctgagcctcgccccatcggcacccgttacctcacccgtaatctgtaa

SEQ ID NO: 937 - protein, 738 aa, Artificial Sequence; identical to SEQ ID NO: 16
  source: /note="Description of Artificial Sequence: Synthetic polypeptide"

SEQ ID NO: 938 - DNA, 2211 bp, Artificial Sequence
  source: /note="Description of Artificial Sequence: Synthetic polynucleotide"
atggctgccgatggttatcttccagattggctcgaggacaacctctctgagggcattcgcgagtggtgggacttgaaacctggagccccgaaacccaaagccaaccagcaaaagcaggacgacggccggggtctggtgcttcctggctacaagtacctcggacccttcaacggactcgacaagggggagcccgtcaacgcggcggacgcagcggccctcgagcacgacaaggcctacgaccagcagctcaaagcgggtgacaatccgtacctgcggtataaccacgccgacgccgagtttcaggagcgtctgcaagaagatacgtcttttgggggcaacctcgggcgagcagtcttccaggccaagaagcgggttctcgaaccttttggtctggttgaggaaggcgctaagacggctcctggaaagaaacgtccggtagagcagtcgccacaagagccagactcctcctcgggcatcggcaagacaggccagcagcccgctaaaaagagactcaattttggtcagactggcgactcagagtcagtccccgacccacaacctctcggagaacctccagcaacccccgctgctgtgggacctactacaatggcttcaggcggtggcgcaccaatggcagacaataacgaaggcgccgacggagtgggtaatgcctcaggaaattggcattgcgattccacatggctgggcgacagagtcatcaccaccagcacccgcacctgggccttgcccacctacaataaccacctctacaagcaaatctccagtgcttcaacgggggccagcaacgacaaccactacttcggctacagcaccccctgggggtattttgatttcaacagattccactgccacttttcaccgcgtgactggcagcgactcatcaacaacaattggggattccggcccaagagactcaacttcaagctcttcaacatccaagtcaaggaggtcacgacgagtgatggcgtcacaaccatcgctaataaccttaccagcacggttcaagtcttctcggactcggagtaccagcttccgtacgtcctcggctctgcgcaccagggctgcctccctccgttcccggcggacgtgttcatgattccgcaatacggctacctgacgctcaacaatggcagccaagccgtgggacgttcatccttttactgcctggaatatttcccttctcagatgctgagaacgggcaacaactttaccttcagctacacctttgaggaagtgcctttccacagcagctacgcgcacagccagagcctggaccggctgatgaatcctctcatcgaccaatacctgtattacctgaacagaactcaaaatcagtccggaagtgcccaaaacaaggacttgctgtttagccgtgggtctccagctggcatgtctgttcagcccaaaaactggctacctggaccctgttatcggcagcagcgcgtttctaaaacaaaaacaggcaacaacaacagcaattttacctggactggtgcttcaaaatataacctcaatgggcatgaatccatcatcaaccctggcactgctatggcctcacacaaagacgacgaagacaagttctttcccatgagcggtgtcatgatttttggaaaagagagcgccggagcttcaaacactgcattggacaatgtcatgattacagacgaagaggaaattaaagccactaaccctgtggccaccgaaagatttgggaccgtggcagtcaatttccagagcagcagcacacaccctgcgaccggagatgtgcatgttatgggagcattacctggcatggtgtggcaagatagagacgtgtacctgcagggtcccatctgggccaaaattcctcacacagatggacactttcacccgtctcctcttatgggcggctttggactcaagcacccgcctcctcagatcctcatcaaaaacacgcctgttcctgcgaatcctccggcggagttttcagctacaaagtttgcttcattcatcacccaatactccacaggacaagtgagtgtggaaattgaatgggagctgcagaaagaaaacagcaagcgctggaatcccgaagtgcagtacacatccaattatgcaaaatctgccaacgttgattttaccgtggacaacaatggactttatactgagcctcgccccattggcacccgttaccttacccgtcccctgtaa

SEQ ID NO: 939 - DNA, 2211 bp, Artificial Sequence; identical to SEQ ID NO: 938
  source: /note="Description of Artificial Sequence: Synthetic polynucleotide"

SEQ ID NO: 940 - DNA, 2202 bp, Artificial Sequence
  source: /note="Description of Artificial Sequence: Synthetic polynucleotide"
atgactgacggttaccttccagattggctagaggacaacctctctgaaggcgttcgagagtggtgggcgctgcaacctggagcccctaaacccaaggcaaatcaacaacatcaggacaacgctcggggtcttgtgcttccgggttacaaatacctcggacccggcaacggacttgacaagggggaacccgtcaacgcagcggacgcggcagccctcgaacacgacaaggcctacgaccagcagctcaaggccggtgacaacccctacctcaagtacaaccacgccgacgccgagtttcaggagcgtcttcaagaagatacgtcttttgggggcaacctcggacgagcagtcttccaggccaaaaagaggatccttgagcctctgggtctggttgaggaagcggctaagacggctcctggaaaaaagagacctgtagagcaatctccagcagaaccggactcctcttcgggcatcggcaaatcaggccagcagcccgctagaaaaagactgaattttggtcagactggcgacacagagtcagtcccagaccctcaaccactcggacaacctcccgcagccccctctggtgtgggatctactacaatggcttcaggcggtggcgcaccaatggcagacaataacgagggtgccgatggagtgggtaattcctcaggaaattggcattgcgattcccaatggctgggcgacagagtcatcaccaccagcacccgcacctgggccctgcccacctacaacaatcacctctacaagcaaatctccagccaatcaggagccaccaacgacaaccactactttggctacagcaccccctgggggtattttgacttcaacagattccactgccacttttcaccacgtgactggcaaagactcatcaacaacaactggggattccgacccaagagactcaacttcaagctctttaacattcaagtcaaagaggtcacgcagaatgacggtacgacgacgattgccaataaccttaccagcacggttcaggtgtttactgactccgagtaccagctcccgtacgtcctcggctcggcgcatcagggatgcctcccgccgttcccagcagacgtcttcatggtcccacagtatggatacctcaccctgaacaacgggagtcaggcggtaggacgctcttccttttactgcctggagtactttccttctcagatgctgcgtactggaaacaactttcagtttagctacacttttgaagacgtgcctttccacagcagctacgctcacagccaaagtctggaccgtctcatgaatcctctgatcgaccagtacctgtactatctgaacaggacacaaacagccagtggaactcagcagtctcggctactgtttagccaagctggacccaccagtatgtctcttcaagctaaaaactggctgcctggaccttgctacagacagcagcgtctgtcaaagcaggcaaacgacaacaacaacagcaactttccctggactggtgccaccaaatatcatctgaatggccgggactcattggtgaacccgggccctgctatggccagtcacaaggatgacaaagaaaagtttttccccatgcatggaaccctgatatttggtaaagaaggaacaaatgccaacaacgcggatttggaaaatgtcatgattacagatgaagaagaaatccgcaccaccaatcccgtggctacggagcagtacgggactgtgtcaaataatttgcaaaactcaaacgctggtccaactactggaactgtcaatcaccaaggagcgttacctggtatggtgtggcaggatcgagacgtgtacctgcagggacccatttgggccaagattcctcacaccgatggacactttcatccttctccactgatgggaggttttgggctcaaacacccgcctcctcagatcatgatcaaaaacactcccgttccagccaatcctcccacaaactttagtgcggcaaagtttgcttccttcatcacacagtactccacggggcaggtcagcgtggagatcgagtgggagctgcagaaggagaacagcaaacgctggaatcccgaaattcagtacacttccaactacaacaaatctgttaatgtggactttactgtggacactaatggtgtgtattcagagcctcgccccattggcaccagatacctgactcgtaatctgtaa

SEQ ID NO: 941 - DNA, 2211 bp, Artificial Sequence
  source: /note="Description of Artificial Sequence: Synthetic polynucleotide"
atggctgccgatggttatcttccagattggctcgaggacaacctctctgagggcattcgcgagtggtgggacttgaaacctggagccccgaaacccaaagccaaccagcaaaagcaggacgacggccggggtctggtgcttcctggctacaagtacctcggacccttcaacggactcgacaagggggagcccgtcaacgcggcggacgcagcggccctcgagcacgacaaggcctacgaccagcagctcaaagcgggtgacaatccgtacctgcggtataaccacgccgacgccgagtttcaggagcgtctgcaagaagatacgtcttttgggggcaacctcgggcgagcagtcttccaggccaagaagcgggttctcgaaccttttggtctggttgaggaaggcgctaagacggctcctggaaagaaacgtccggtagagcagtcgccacaagagccagactcctcctcgggcatcggcaagacaggccagcagcccgctaaaaagagactcaattttggtcagactggcgactcagagtcagtccccgacccacaacctctcggagaacctccagcaacccccgctgctgtgggacctactacaatggcttcaggcggtggcgcaccaatggcagacaataacgaaggcgccgacggagtgggtaatgcctcaggaaattggcattgcgattccacatggctgggcgacagagtcatcaccaccagcacccgcacctgggccttgcccacctacaataaccacctctacaagcaaatctccagtgcttcaacgggggccagcaacgacaaccactacttcggctacagcaccccctgggggtattttgatttcaacagattccactgccacttttcaccacgtgactggcagcgactcatcaacaacaattggggattccggcccaagagactcaacttcaagctcttcaacatccaagtcaaggaggtcacgacgaatgatggcgtcacaaccatcgctaataaccttaccagcacggttcaagtcttctcggactcggagtaccagcttccgtacgtcctcggctctgcgcaccagggctgcctccctccgttcccggcggacgtgttcatgattccgcaatacggctacctgacgctcaacaatggcagccaagccgtgggacgttcatccttttactgcctggaatatttcccttctcagatgctgagaacgggcaacaactttaccttcagctacacctttgaggaagtgcctttccacagcagctacgcgcacagccagagcctggaccggctgatgaatcctctcatcgaccaatacctgtattacctgaacagaactcaaaatcagtccggaagtgcccaaaacaaggacttgctgtttagccgtgggtctccagctggcatgtctgttcagcccaaaaactggctacctggaccctgttatcggcagcagcgcgtttctaaaacaaaaacagacaacaacaacagcaattttacctggactggtgcttcaaaatataacctcaatgggcgtgaatccatcatcaaccctggcactgctatggcctcacacaaagacgacgaagacaagttctttcccatgagcggtgtcatgatttttggaaaagagagcgccggagcttcaaacactgcattggacaatgtcatgattacagacgaagaggaaattaaagccactaaccctgtggccaccgaaagatttgggaccgtggcagtcaatttccagagcagcagcacagaccctgcgaccggagatgtgcatgttatgggagcattacctggcatggtgtggcaagatagagacgtgtacctgcagggtcccatctgggccaaaattcctcacacagatggacactttcacccgtctcctcttatgggcggctttggactcaagcacccgcctcctcagatcctcatcaaaaacacgcctgttcctgcgaatcctccggcggagttttcagctacaaagtttgcttcattcatcacccaatactccacaggacaagtgagtgtggaaattgaatgggagctgcagaaagaaaacagcaagcgctggaatcccgaagtgcagtacacatccaattatgcaaaatctgccaacgttgattttaccgtggacaacaatggactttatactgagcctcgccccattggcacccgttaccttacccgtcccctgtaa

SEQ ID NO: 942 - DNA, 2211 bp, Artificial Sequence
  source: /note="Description of Artificial Sequence: Synthetic polynucleotide"
atggctgccgatggttatcttccagattggctcgaggacaacctctctgagggcattcgcaagtggtgggacttgaaacctggagccccgaaacccaaagccaaccagcaaaagcaggacgacggccggggtctggtgcttcctggctacaagtacctcggacccttcaacggactcgacaagggggagcccgtcaacgcggcggacgcagcggccctcgagcacgacaaggcctacgaccagcagctcaaagcgggtgacaatccgtacctgcggtataaccacgccgacgccgagtttcaggagcgtctgcaagaagatacgtcttttgggggcaacctcgggagagcagtcttccaggccaagaagcgggttctcgaaccttttggtctggttgaggaaggcgctaagacggctcctggaaagaaacgtccggtagagcagtcgccacaagagccagactcctcctcgggcatcggcaagacaggccagcagcccgctaaaaagagactcaattttggtcagactggcgactcagagtcagtccccgacccacaacctctcggagaacctccagcaacccccgctgctgtgggacctactacaatggcttcaggcggtggcgcaccaatggcagacaataacgaaggcgccgacggagtgggtaatgcctcaggaaattggcattgcgattccacatggctgggcgacagagtcatcaccaccagcacccgcacctgggccttgcccacctacaataaccacctctacaagcaaatctccagtgcttcaacgggggccagcaacgacaaccactacttcggctacagcaccccctgggggtattttgatttcaacagattccactgccacttttcaccacgtgactggcagcgactcatcaacaacaattggggattccggcccaagagactcaacttcaagctcttcaacatccaagtcaaggaggtcacgacgaatgatggcgtcacaaccatcgctaataaccttaccagcacggttcaagtcttctcggactcggagtaccagcttccgtacgtcctcggctctgcgcaccagggctgcctccctccgttcccggcggacgtgttcatgattccgcaatacggctacctgacgctcaacaatggcagccaagccgtgggacgttcatccttttactgcctggaatatttcccttctcagatgctgagaacgggcaacaactttaccttcagctacacctttgaggaagtgcctttccacagcagctacgcgcacagccagagcctggaccggctgatgaatcctctcatcgaccaatacctgtattacctgaacagaactcaaaatcagtccggaagtgcccaaaacaaggacttgctgtttagccgtgggtctccagctggcatgtctgttcagcccaaaaactggctacctggaccctgttatcggcagcagcgcgtttctaaaacaaaaacagacaacaacaacagcaattttacctggactggtgcttcaaaatataacctcaatgggcgtgaatccatcatcaaccctggcactgctatggcctcacacaaagacgacaaagacaagttctttcccatgagcggtgtcatgatttttggaaaagagagcgccggagcttcaaacactgcattggacaatgtcatgattacagacgaagaggaaattaaagccactaaccctgtggccaccgaaagatttgggaccgtggcagtcaatttccagagcagcagcacagaccctgcgaccggagatgtgcatgttatgggagcattacctggcatggtgtggcaagatagagacgtgtacctgcagggtcccatttgggccaaaattcctcacacagatggacactttcacccgtctcctcttatgggcggctttggactcaagcacccgcctcctcagatcctcatcaaaaacacacctgttcctgcgaatcctccggcggagttttcagctacaaagtttgcttcattcatcacccaatactccacaggacaagtgagtgtggaaattgaatgggagctgcagaaagaaaacagcaagcgctggaatcccgaagtgcagtacacatccaattatgcaaaatctgccaacgttgattttaccgtggacaacaatggactttatactgagcctcgccccattggcacccgttaccttacccgtcccctgtaa

SEQ ID NO: 943 - DNA, 2211 bp, Artificial Sequence
  source: /note="Description of Artificial Sequence: Synthetic polynucleotide"
atggctgccgatggttatcttccagattggctcgaggacaacctctctgagggcattcgcgagtggtgggacttgaaacctggagccccgaaacccaaagccaaccagcaaaagcaggacaacggccggggtctggtgcttcctggctacaagtacctcggacccttcaacggactcgacaagggggagcccgtcaacgcggcggacgcagcggccctcgagcacgacaaggcctacgaccagcagctcaaagcgggtgacaatccgtacctgcggtataaccacgccgacgccgagtttcaggagcgtctgcaagaagatacgtcttttgggggcaacctcgggcgagcagtcttccaggccaagaagcgggttctcgaaccttttggtctggttgaggaaggcgctaagacggctcctggaaagaaacgtccggtagagcagtcgccacaagagccagactcctcctcgggcatcggcaagacaggccagcagcccgctaaaaagagactcaattttggtcagactggcgactcagagtcagtccccgacccacaacctctcggagaacctccagcaacccccgctgctgtgggacctactacaatggcttcaggcggtggcgcaccaatggcagacaataacgaaggcgccgacggagtgggtaatgcctcaggaaattggcattgcgattccacatggctgggcgacagagtcatcaccaccagcacccgcacctgggccttgcccacctacaataaccacctctacaagcaaatctccagtgcttcaacgggggccagcaacgacaaccactacttcggctacagcaccccctgggggtattttgatttcaacagattccactgccacttttcaccacgtgactggcagcgactcatcaacaacaattggggattccggcccaagagactcaacttcaagctcttcaacatccaagtcaaggaggtcacgacgaatgatggcgtcacaaccatcgctaataaccttaccagcacggttcaagtcttctcggactcggagtaccagcttccgtacgtcctcggctctgcgcaccagggctgcctccctccgttcccggcggacgtgttcatgattccgcaatacggctacctgacgctcaacaatggcagccaagccgtgggacgttcatccttttactgcctggaatatttcccttctcagatgctgagaacgggcaacaactttaccttcagctacacctttgaggaagtgcctttccacagcagctacgcgcacagccagagcctggaccggctgatgaatcctctcatcgaccaatacctgtattacctgaacagaactcaaaatcagtccggaagtgcccaaaacaaggacttgctgtttagccgtgggtctccagctggcatgtctgttcagcccaaaaactggctacctggaccctgttatcggcagcagcgcgtttctaaaacaaaaacagacaacaacaacagcaattttacctggactggtgcttcaaaatataacctcaatgggcgtgaatccatcatcaaccctggcactgctatggcctcacacaaagacgacgaagacaagttctttcccatgagcggtgtcatgatttttggaaaagagagcgccggagcttcaaacactgcattggacaatgtcatgattacagacgaagaggaaattaaagccactaaccctgtggccaccgaaagatttgggaccgtggcagtcaatttccagagcagcagcacacaccctgcgaccggagatgtgcatgttatgggagcattacctggcatggtgtggcaagatagagacgtgtacctgcagggtcccatctgggccaaaattcctcacacagatggacactttcacccgtctcctcttatgggcggctttggactcaagcacccgcctcctcagatcctcatcaaaaacacgcctgttcctgcgaatcctccggcggagttttcagctacaaagtttgcttcattcatcacccaatactccacaggacaagtgagtgtggaaattgaatgggagctgcagaaagaaaacagcaagcgctggaatcccgaagtgcagtacacatccaattatgcaaaatctgccaacgttgattttaccgtggacaacaatggactttatactgagcctcgccccattggcacccgttaccttacccgtcccctgtaa

SEQ ID NO: 944 - DNA, 2211 bp, Artificial Sequence
  source: /note="Description of Artificial Sequence: Synthetic polynucleotide"
atggctgccgatggttatcttccagattggctcgaggacaacctctctgagggcattcgcgagtggtgggacttgaaacctggagccccgaaacccaaagccaaccagcaaaagcaggacgacggccggggtctggtgcttcctggctacaagtacctcggacccttcaacggactcgacaagggggagcccgtcaacgcggcggacgcagcggccctcgagcacgacaaggcctacgaccagcagctcaaagcgggtgacaatccgtacctgcggtataaccacgccgacgccgagtttcaggagcgtctgcaagaagatacgtcttttgggggcaacctcgggcgagcagtcttccaggccaaaaagcgggttctcgaaccttttggtctggttgaggaaggcgctaagacggctcctggaaagaaacgtccggtagagcagtcgccacaagagccagactcctcctcgggcatcggcaagacaggccagcagcccgctaaaaagagactcaattttggtcagactggcgactcagagtcagtccccgacccacaacctctcggagaacctccagcaacccccgctgctgtgggacctactacaatggcttcaggcggtggcgcaccaatggcagacaataacgaaggcgccgacggagtgggtaatgcctcaggaaattggcattgcgattccacatggctgggcgacagagtcatcaccaccagcacccgcacctgggccttgcccacctacaataaccacctctacaagcaaatctccagtgcttcaacgggggccagcaacgacaaccactacttcggctacagcaccccctgggggtattttgatttcaacagattccactgccacttttcaccacgtgactggcagcgactcatcaacaacaattggggattccggcccaagagactcaacttcaagctcttcaacatccaagtcaaggaggtcacgacgaatgatggcgtcacaaccatcgctaataaccttaccagcacggttcaagtcttctcggactcggagtaccagcttccgtacgtcctcggctctgcgcaccagggctgcctccctccgttcccggcggacgtgttcatgattccgcaatacggctacctgacgctcaacaatggcagccaagccgtgggacgttcatccttttattgcctggaatatttcccatcgcagatgctgagaacgggcaataactttaccttcagctacacctttgaggacgtgcctttccacagcagctacgcgcacagccagagcctggaccggctgatgaatcctctcatcgaccagtacctgtattacctgaacagaactcagaaccagtccggaagtgcccaaaacaaggacttgctgtttagccgggggtctccagctggcatgtctgttcagctcaaaaactggctacctggaccctgttatcggcagcagcgcgtttctaaaacaaaaacagacaacaacaacagcaattttacctggactggtgcttcaaaatataaccttaatgggcgtgaatccatcatcaaccctggcactgctatggcctcacacaaagacgacgaagacaagttctttcccatgagcggtgtcatgatttttggaaaagagagcgccggagcttcaaacactgcattggacaatgtcatgattacagacgaagaggaaattaaagccactaaccctgtggccaccgaaagatttgggaccgtggcagtcaatttccagagcagcagcacagaccctgcgaccggagatgtgcatgttatgggagcattacctggcatggtgtggcaagatagagacgtgtacctgcagggtcccatttgggccaaaattcctcacacagatggacactttcacccgtctcctcttatgggcggctttggactcaaacacccgcctcctcagatcctcatcaaaaacacacctgttcctgcgaatcctccggcggagttttcagctacaaagtttgcttcattcatcacccaatactccacaggacaagtgagcgtggaaattgaatgggagctgcagaaagaaaacagcaagcgctggaatcccgaagtgcagtacacatccaattatgcaaaatctgccaacgttgattttaccgtggacaacaatggactttatactgagcctcgccccattggcacccgttaccttacccgtcccctgtaa

SEQ ID NO: 945 - DNA, 2211 bp, Artificial Sequence
  source: /note="Description of Artificial Sequence: Synthetic polynucleotide"
atggctgccgatggttatcttccagattggctcgaggacaacctctctgagggcattcgcgagtggtgggacttgaaacctggagccccgaaacccaaagccaaccagcaaaagcaggacgacggccggggtctggtgcttcctggctacaagtacctcggacccttcaacggactcgacaagggggagcccgtcaacgcggcggacgcagcggccctcgagcacgacaaggcctacgaccagcagctcaaagcgggtgacaatccgtacctgcggtataaccacgccgacgccgagtttcaggagcgtctgcaagaagatacgtcttttgggggcaacctcgggcgagcagtcttccaggccaagaagcgggttctcgaaccttttggtctggttgaggaaggtgctaagacggctcctggaaagaagagaccggtagagcagtcgccccaagaaccagactcctcatcgggcatcggcaaatcaggccagcagcccgctaaaaagagactcaattttggtcagactggcgactcagagtcagtccccgacccacaacctctcggagaacctccagcaacccccgctgctgtgggacctactacaatggcttcaggcggtggcgcaccaatggcagacaataacgaaggcgccgacggagtgggtaatgcctcaggaaattggcattgcgattccacatggctgggcgacagagtcattaccaccagcacccgaacctgggccctgcccacctataacaaccacctctacaaacaaatctccagcgcttcaacgggggccagcaacgacaaccactacttcggctacagcaccccctgggggtattttgattttaacagattccactgccacttctcaccacgtgactggcagcgactcatcaacaacaattggggattccggcccaagagactcaacttcaagctcttcaacatccaagtcaaggaggtcacgacgaacgatggcgtcacgaccatcgctaataaccttaccagcacggttcaagtcttctcggactcggagtaccagttgccgtacgtcctcggctctgcgcaccagggctgcctccctccgttcccggcggacgtgttcatgattccgcagtacggctacctaacactcaacaatggcagccaggccgtgggacgttcatccttttactgcctggaatatttcccatcgcagatgctgagaacgggcaataactttaccttcagctacacattcgaggacgtgcctttccacagcagctacgcgcacagccaaagcctggaccggctgatgaatcctctcatcgaccagtacttgtattacctaaacagaactcaaaatcagtccggaagtgcccaaaacaaggacttgctgtttagccgggggtctccagctggcatgtctgttcagcccaaaaactggctacctggaccctgttatcggcagcagcgcgtttctaaaacaaaaacagacaacaacaacagcaactttacctggactggtgcttcaaaatataaccttaatgggcgtgaatctataatcaaccctggcactgctatggcttcacacaaagacgacgaagacaagttctttccaatgagcggtgtcatgatttttggcaaggagagcgccggagcttcaaacactgcattggacaatgtcatgattacagacgaagaggaaattaaagccactaaccctgtggccaccgaaagatttgggaccgtggcagtcaatttccagagcagcagcacagaccctgcgaccggagatgtgcatgttatgggagcattacctggcatggtgtggcaagatagagacgtgtacctgcagggtccaatttgggccaaaattcctcacacagatggacactttcacccgtctcctcttatgggcggctttggacttaagcacccgcctcctcagatcctcatcaaaaacacgcctgttcctgcgaatcctccggcagagttttcggctacaaagtttgcttcattcatcacccagtattccacaggacaagtgagtgtggaaattgaatgggagttgcagaaagaaaacagcaagcgttggaatcccgaagtgcagtacacatctaattatgcaaaatctgccaacgttgatttcactgtggacaacaatggactttatactgagcctcgccccattggcacccgttacctcacccgtcccctgtaa

SEQ ID NO: 946 - DNA, 2211 bp, Artificial Sequence
  source: /note="Description of Artificial Sequence: Synthetic polynucleotide"
atggctgccgatggttatcttccagattggctcgaggacaacctctctgagggcattcgcgagtggtgggacttgaaacctggagccccgaaacccaaagccaaccagcaaaagcaggacgacggccggggtctggtgcttcctggctacaagtacctcggacccttcaacggactcgacaagggggagcccgtcaacgcggcggacgcagcggccctcgagcacgacaaggcctacgaccagcagctcaaagcgggtgacaatccgtacctgcggtataaccacgccgacgccgagtttcaggagcgtctgcaagaagatacgtcttttgggggcaacctcgggcgagcagtcttccaggccaagaagagggttctcgaaccttttggtctggttgaggaaggtgctaagacggctcctggaaagaaacgtccggtagagcagtcaccccaagaaccagactcctcctcgggcattggcaaatcaggccagcagcccgctaaaaagagactcaattttggtcagactggcgactcagagtcagtccccgacccacaacctctcggagaacctccagcaacccccgctgctttgggacctactacaatggcttcaggcggtggcgcaccaatggcagacaataacgaaggcgccgacggagtgggtaatgcctcaggaaattggcattgcgattccacatggctgggcgacagagtcatcaccaccagcacccgcacctgggccttgcccacctacaataaccacctctacaagcaaatctccagtgcttcaacgggggccagcaacgacaaccactacttcggctacagcaccccctgggggtattttgatttcaacagattccactgccatttctcaccacgtgactggcagcgactcatcaacaacaactggggattccggcccaagagactcaacttcaagctcttcaacatccaagtcaaggaggtcacgacgaacgatggcgtcacgaccatcgctaataaccttaccagcacggttcaagtcttctcggactcggagtaccagcttccgtacgtcctcggctctgcgcaccagggctgcctccctccgttcccggcggacgtgttcatgattccgcagtacggctacctgacgctcaacaatggcagcaaagccgtgggacgttcatccttttactgcctggaatatttcccttctcagatgctgagaacgggcaacaactttaccttcagctacacctttgaggaagtgcctttccacagcagctacgcgcacagccagagcctggaccggctgatgaatcctctcatcgaccaatacctgtattacctgaacagaactcaaaatcagtccggaagtgcccaaaacaaggacttgctgtttagccgtgggtctccagctggcatgtctgttcagcccaaaaactggctacctggaccctgttatcggcagcagcgcgtttctaaaacaaaaacagacaacaacaacagcaattttacctggactggtgcttcaaaatataacctcaatgggcgtgaatccatcatcaaccctggcactgctatggcctcacacaaagacgacgaagacaagttctttcccatgagcggtgtcatgatttttggaaaagagagcgccggagcttcaaacactgcattggacaatgtcatgattacagacgaagaggaaattaaagccactaaccctgtggccaccgaaagatttgggaccgtggcagtcaatttccagagcagcagcacagaccctgcgaccggagatgtgcatgttatgggagcattacctggcatggtgtggcaagatagagacgtgtacctgcagggtcccatttgggccaaaattcctcacacggatggacactttcacccgtctcctcttatgggcggctttggactcaagcacccgcctcctcagatcctcatcaaaaacacacctgttcctgcgaatcctccggcagagttttcggctacaaagtttgcttcattcatcacccagtactccacaggacaagtgagcgtggaaattgaatgggagttgcagaaagaaaacagtaagcgctggaatcccgaagtgcagtacacatctaattatgcaaaatctgccaacgttgacttcactgtggacaacaatggactttatactgagcctcgccccattggcacccgttacctcacccgtcccctgtaa

SEQ ID NO: 947 - DNA, 2970 bp, Artificial Sequence
  source: /note="Description of Artificial Sequence: Synthetic polynucleotide"
agatgaccgccaaggtcgtagagtccgccaaggccattctgggcggcagcaaggtgcgcgtggaccaaaaatgcaaggcctctgcgcagatcgaccccacccccgtgatcgtcacctccaacaccaacatgtgcgccgtgattgacgggaacagcaccaccttcgagcaccagcagcccctgcaggaccggatgttcaagtttgaactcacccgccgcctcgactacgactttggcaaggtcaccaagcaggaagtcaaggactttttccggtgggcggctgatcacgtgactgacgtggctcatgagttttacgtcacaaagggtggagctaagaaaaggcccgccccctctgacgaggatataagcgagcccaagcggccgcgcgtgtcatttgcgcagccggagacgtcagacgcggaagctcccggagacttcgccgacaggtaccaaaacaaatgttctcgtcacgcgggtatgctgcagatgctctttccctgcaagacgtgcgagagaatgaatcagaattccaacgtctgcttcacgcacggtcagaaagattgcggggagtgctttcccgggtcagaatctcaaccggtttctgtcgtcagaaaaacgtatcagaaactgtgcatccttcatcagctccggggggcacccgagatcgcctgctctgcttgcgaccaactcaaccccgatttggacgattgccaatttgagcaataaatgactgaaatcaggtatggctgctgacggttatcttccagattggctcgaggacaacctctctgaaggcattcgcgagtggtgggcgctgaaacctggagctccacaacccaaggccaaccaacagcatcaggacaacggcaggggtcttgtgcttcctgggtacaagtacctcggacccttcaacggactcgacaagggagagccggtcaacgaggcagacgccgcggccctcgagcacgacaaggcctacgacaagcagctcgagcagggggacaacccgtatctcaagtacaaccacggcgacgccgagttccagcagcgcttggcgaccgacacctcttttgggggcaacctcgggcgagcagtcttccaggccaaaaagaggattctcgagcctctgggtctggttgaagagggcgttaaaacggctcctggaaagaaacgcccattagaaaagactccaaatcggccgaccaacccggactctgggaaggccccggccaagaaaaagcaaaaagacggcgaaccagccgactctgctagaaggacactcgactttgaagactctggagcaggagacggaccccctgagggatcatcttccggagaaatgtctcatgatgctgagatgcgtgcggcgccaggcggaaatgctgtcgaggcgggacaaggtgccgatggagtgggtaatgcctccggtgattggcattgcgattccacctggtcagagggccgagtcaccaccaccagcacccgaacctgggtcctacccacgtacaacaaccacctgtacctgcgaatcggaacaacggccaacagcaacacctacaacggattctccaccccctggggatactttgactttaaccgcttccactgccacttttccccacgcgactggcagcgactcatcaacaacaactggggactcaggccgaaatcgatgcgtgttaaaatcttcaacatacaggtcaaggaggtcacgacgtcaaacggcgagactacggtcgctaataaccttaccagcacggttcagatctttgcggattcgacgtatgaactcccatacgtgatggacgccggtcaggaggggagctttcctccgtttcccaacgacgtctttatggttccccaatacggatactgcggagttgtcactggaaaaaaccagaaccagacagacagaaatgccttttactgcctggaatactttccatcccaaatgctaagaactggcaacaattttgaagtcagttaccaatttgaaaaagttcctttccattcaatgtacgcgcacagccagagcctggacagaatgatgaatcctttactggatcagtacctgtggcatctgcaatcgaccactaccggaaattcccttaatcaaggaacagctaccaccacgtacgggaaaattaccactggagactttgcctactacaggaaaaactggttgcctggagcctgcattaaacaacaaaaattttcaaagaatgccaatcaaaactacaagattcccgccagcgggggagacgcccttttaaagtatgacacgcataccactctaaatgggcgatggagtaacatggctcctggacctccaatggcaaccgcaggtgccggggactcggattttagcaacagccagctgatctttgccggacccaatccgagcggtaacacgaccacatcttcaaacaatttgttgtttacctcagaagaggagattgccacaacaaacccacgagacacggacatgtttggacagattgcagataataatcaaaatgccaccaccgcccctcacatcgctaacctggacgctatgggaattgttcccggaatggtctggcaaaacagagacatctactaccagggccctatttgggccaaggtccctcacacggacggacactttcacccttcgccgctgatgggaggatttggactgaaacacccgcctccacagattttcatcaaaaacacccccgtacccgccaatcccaatactacctttagcgctgcaaggattaattcttttctgacgcagtacagcaccggacaagttgccgttcagatcgactgggaaattcagaaggagcattccaaacgctggaatcccgaagttcaatttacttcaaactacggcactcaaaattctatgctgtgggctcccgacaatgctggcaactaccacgaactccgggctattgggtcccgtttcctcacccaccacttgtaa

SEQ ID NO: 948 - protein, 736 aa, Artificial Sequence
  source: /note="Description of Artificial Sequence: Synthetic polypeptide"
MAADGYLPDWLEDNLSEGIREWWDLKPGAPKPKANQQKQDDGRGLVLPGYKYLGPFNGLDKGEPVNAADAAALEHDKAYDQQLKAGDNPYLRYNHADAEFQERLQEDTSFGGNLGRAVFQAKKRVLEPFGLVEEGAKTAPGKKRPVEQSPQEPDSSSGIGKTGQQPAKKRLNFGQTGDSESVPDPQPLGEPPATPAAVGPTTMASGGGAPMADNNEGADGVGNASGNWHCDSTWLGDRVITTSTRTWALPTYNNHLYKQISSASTGASNDNHYFGYSTPWGYFDFNRFHCHFSPRDWQRLINNNWGFRPKRLNFKLFNIQVKEVTTSDGVTTIANNLTSTVQVFSDSEYQLPYVLGSAHQGCLPPFPADVFMIPQYGYLTLNNGSQAVGRSSFYCLEYFPSQMLRTGNNFTFSYTFEEVPFHSSYAHSQSLDRLMNPLIDQYLYYLNRTQNQSGSAQNKDLLFSRGSPAGMSVQPKNWLPGPCYRQQRVSKTKTGNNNSNFTWTGASKYNLNGHESIINPGTAMASHKDDEDKFFPMSGVMIFGKESAGASNTALDNVMITDEEEIKATNPVATERFGTVAVNFQSSSTHPATGDVHVMGALPGMVWQDRDVYLQGPIWAKIPHTDGHFHPSPLMGGFGLKHPPPQILIKNTPVPANPPAEFSATKFASFITQYSTGQVSVEIEWELQKENSKRWNPEVQYTSNYAKSANVDFTVDNNGLYTEPRPIGTRYLTRPL

SEQ ID NO: 949 - protein, 736 aa, Artificial Sequence; identical to SEQ ID NO: 948
  source: /note="Description of Artificial Sequence: Synthetic polypeptide"

SEQ ID NO: 950 - protein, 733 aa, Artificial Sequence
  source: /note="Description of Artificial Sequence: Synthetic polypeptide"
MTDGYLPDWLEDNLSEGVREWWALQPGAPKPKANQQHQDNARGLVLPGYKYLGPGNGLDKGEPVNAADAAALEHDKAYDQQLKAGDNPYLKYNHADAEFQERLQEDTSFGGNLGRAVFQAKKRILEPLGLVEEAAKTAPGKKRPVEQSPAEPDSSSGIGKSGQQPARKRLNFGQTGDTESVPDPQPLGQPPAAPSGVGSTTMASGGGAPMADNNEGADGVGNSSGNWHCDSQWLGDRVITTSTRTWALPTYNNHLYKQISSQSGATNDNHYFGYSTPWGYFDFNRFHCHFSPRDWQRLINNNWGFRPKRLNFKLFNIQVKEVTQNDGTTTIANNLTSTVQVFTDSEYQLPYVLGSAHQGCLPPFPADVFMVPQYGYLTLNNGSQAVGRSSFYCLEYFPSQMLRTGNNFQFSYTFEDVPFHSSYAHSQSLDRLMNPLIDQYLYYLNRTQTASGTQQSRLLFSQAGPTSMSLQAKNWLPGPCYRQQRLSKQANDNNNSNFPWTGATKYHLNGRDSLVNPGPAMASHKDDKEKFFPMHGTLIFGKEGTNANNADLENVMITDEEEIRTTNPVATEQYGTVSNNLQNSNAGPTTGTVNHQGALPGMVWQDRDVYLQGPIWAKIPHTDGHFHPSPLMGGFGLKHPPPQIMIKNTPVPANPPTNFSAAKFASFITQYSTGQVSVEIEWELQKENSKRWNPEIQYTSNYNKSVNVDFTVDTNGVYSEPRPIGTRYLTRNL

SEQ ID NO: 951 - protein, 736 aa, Artificial Sequence; identical to SEQ ID NO: 766
  source: /note="Description of Artificial Sequence: Synthetic polypeptide"

SEQ ID NO: 952 - protein, 736 aa, Artificial Sequence
  source: /note="Description of Artificial Sequence: Synthetic polypeptide"
MAADGYLPDWLEDNLSEGIRKWWDLKPGAPKPKANQQKQDDGRGLVLPGYKYLGPFNGLDKGEPVNAADAAALEHDKAYDQQLKAGDNPYLRYNHADAEFQERLQEDTSFGGNLGRAVFQAKKRVLEPFGLVEEGAKTAPGKKRPVEQSPQEPDSSSGIGKTGQQPAKKRLNFGQTGDSESVPDPQPLGEPPATPAAVGPTTMASGGGAPMADNNEGADGVGNASGNWHCDSTWLGDRVITTSTRTWALPTYNNHLYKQISSASTGASNDNHYFGYSTPWGYFDFNRFHCHFSPRDWQRLINNNWGFRPKRLNFKLFNIQVKEVTTNDGVTTIANNLTSTVQVFSDSEYQLPYVLGSAHQGCLPPFPADVFMIPQYGYLTLNNGSQAVGRSSFYCLEYFPSQMLRTGNNFTFSYTFEEVPFHSSYAHSQSLDRLMNPLIDQYLYYLNRTQNQSGSAQNKDLLFSRGSPAGMSVQPKNWLPGPCYRQQRVSKTKTDNNNSNFTWTGASKYNLNGRESIINPGTAMASHKDDKDKFFPMSGVMIFGKESAGASNTALDNVMITDEEEIKATNPVATERFGTVAVNFQSSSTDPATGDVHVMGALPGMVWQDRDVYLQGPIWAKIPHTDGHFHPSPLMGGFGLKHPPPQILIKNTPVPANPPAEFSATKFASFITQYSTGQVSVEIEWELQKENSKRWNPEVQYTSNYAKSANVDFTVDNNGLYTEPRPIGTRYLTRPL

SEQ ID NO: 953 - protein, 736 aa, Artificial Sequence
  source: /note="Description of Artificial Sequence: Synthetic polypeptide"
MAADGYLPDWLEDNLSEGIREWWDLKPGAPKPKANQQKQDNGRGLVLPGYKYLGPFNGLDKGEPVNAADAAALEHDKAYDQQLKAGDNPYLRYNHADAEFQERLQEDTSFGGNLGRAVFQAKKRVLEPFGLVEEGAKTAPGKKRPVEQSPQEPDSSSGIGKTGQQPAKKRLNFGQTGDSESVPDPQPLGEPPATPAAVGPTTMASGGGAPMADNNEGADGVGNASGNWHCDSTWLGDRVITTSTRTWALPTYNNHLYKQISSASTGASNDNHYFGYSTPWGYFDFNRFHCHFSPRDWQRLINNNWGFRPKRLNFKLFNIQVKEVTTNDGVTTIANNLTSTVQVFSDSEYQLPYVLGSAHQGCLPPFPADVFMIPQYGYLTLNNGSQAVGRSSFYCLEYFPSQMLRTGNNFTFSYTFEEVPFHSSYAHSQSLDRLMNPLIDQYLYYLNRTQNQSGSAQNKDLLFSRGSPAGMSVQPKNWLPGPCYRQQRVSKTKTDNNNSNFTWTGASKYNLNGRESIINPGTAMASHKDDEDKFFPMSGVMIFGKESAGASNTALDNVMITDEEEIKATNPVATERFGTVAVNFQSSSTHPATGDVHVMGALPGMVWQDRDVYLQGPIWAKIPHTDGHFHPSPLMGGFGLKHPPPQILIKNTPVPANPPAEFSATKFASFITQYSTGQVSVEIEWELQKENSKRWNPEVQYTSNYAKSANVDFTVDNNGLYTEPRPIGTRYLTRPL

SEQ ID NO: 954 - protein, 736 aa, Artificial Sequence
  source: /note="Description of Artificial Sequence: Synthetic polypeptide"
MAADGYLPDWLEDNLSEGIREWWDLKPGAPKPKANQQKQDDGRGLVLPGYKYLGPFNGLDKGEPVNAADAAALEHDKAYDQQLKAGDNPYLRYNHADAEFQERLQEDTSFGGNLGRAVFQAKKRVLEPFGLVEEGAKTAPGKKRPVEQSPQEPDSSSGIGKTGQQPAKKRLNFGQTGDSESVPDPQPLGEPPATPAAVGPTTMASGGGAPMADNNEGADGVGNASGNWHCDSTWLGDRVITTSTRTWALPTYNNHLYKQISSASTGASNDNHYFGYSTPWGYFDFNRFHCHFSPRDWQRLINNNWGFRPKRLNFKLFNIQVKEVTTNDGVTTIANNLTSTVQVFSDSEYQLPYVLGSAHQGCLPPFPADVFMIPQYGYLTLNNGSQAVGRSSFYCLEYFPSQMLRTGNNFTFSYTFEDVPFHSSYAHSQSLDRLMNPLIDQYLYYLNRTQNQSGSAQNKDLLFSRGSPAGMSVQLKNWLPGPCYRQQRVSKTKTDNNNSNFTWTGASKYNLNGRESIINPGTAMASHKDDEDKFFPMSGVMIFGKESAGASNTALDNVMITDEEEIKATNPVATERFGTVAVNFQSSSTDPATGDVHVMGALPGMVWQDRDVYLQGPIWAKIPHTDGHFHPSPLMGGFGLKHPPPQILIKNTPVPANPPAEFSATKFASFITQYSTGQVSVEIEWELQKENSKRWNPEVQYTSNYAKSANVDFTVDNNGLYTEPRPIGTRYLTRPL

SEQ ID NO: 955 - protein, 736 aa, Artificial Sequence
  source: /note="Description of Artificial Sequence: Synthetic polypeptide"
MAADGYLPDWLEDNLSEGIREWWDLKPGAPKPKANQQKQDDGRGLVLPGYKYLGPFNGLDKGEPVNAADAAALEHDKAYDQQLKAGDNPYLRYNHADAEFQERLQEDTSFGGNLGRAVFQAKKRVLEPFGLVEEGAKTAPGKKRPVEQSPQEPDSSSGIGKSGQQPAKKRLNFGQTGDSESVPDPQPLGEPPATPAAVGPTTMASGGGAPMADNNEGADGVGNASGNWHCDSTWLGDRVITTSTRTWALPTYNNHLYKQISSASTGASNDNHYFGYSTPWGYFDFNRFHCHFSPRDWQRLINNNWGFRPKRLNFKLFNIQVKEVTTNDGVTTIANNLTSTVQVFSDSEYQLPYVLGSAHQGCLPPFPADVFMIPQYGYLTLNNGSQAVGRSSFYCLEYFPSQMLRTGNNFTFSYTFEDVPFHSSYAHSQSLDRLMNPLIDQYLYYLNRTQNQSGSAQNKDLLFSRGSPAGMSVQPKNWLPGPCYRQQRVSKTKTDNNNSNFTWTGASKYNLNGRESIINPGTAMASHKDDEDKFFPMSGVMIFGKGSAGASNTALDNVMITDEEEIKATNPVATERFGTVAVNFQSSSTDPATGDVHVMGALPGMVWQDRDVYLQGPIWAKIPHTDGHFHPSPLMGGFGLKHPPPQILIKNTPVPANPPAEFSATKFASFITQYSTGQVSVEIEWELQKENSKRWNPEVQYTSNYAKSANVDFTVDNNGLYTEPRPIGTRYLTRPL

SEQ ID NO: 956 - protein, 736 aa, Artificial Sequence; identical to SEQ ID NO: 697
  source: /note="Description of Artificial Sequence: Synthetic polypeptide"

SEQ ID NO: 957 - protein, 742 aa, Artificial Sequence
  source: /note="Description of Artificial Sequence: Synthetic polypeptide"
MAADGYLPDWLEDNLSEGIREWWALKPGAPQPKANQQHQDNGRGLVLPGYKYLGPFNGLDKGEPVNEADAAALEHDKAYDKQLEQGDNPYLKYNHADAEFQQRLATDTSFGGNLGRAVFQAKKRILEPLGLVEEGVKTAPGKKRPLEKTPNRPTNPDSGKAPAKKKQKDGEPADSARRTLDFEDSGAGDGPPEGSSSGEMSHDAEMRAAPGGNAVEAGQGADGVGNASGDWHCDSTWSEGRVTTTSTRTWVLPTYNNHLYLRIGTTANSNTYNGFSTPWGYFDFNRFHCHFSPRDWQRLINNNWGLRPKSMRVKIFNIQVKEVTTSNGETTVANNLTSTVQIFADSTYELPYVMDAGQEGSFPPFPNDVFMVPQYGYCGVVTGKNQNQTDRNAFYCLEYFPSQMLRTGNNFEVSYQFEKVPFHSMYAHSQSLDRMMNPLLDQYLWHLQSTTTGNSLNQGTATTTYGKITTGDFAYYRKNWLPGACIKQQKFSKNANQNYKIPASGGDALLKYDTHTTLNGRWSNMAPGPPMATAGAGDSDFSNSQLIFAGPNPSGNTTTSSNNLLFTSEEEIATTNPRDTDMFGQIADNNQNATTAPHIANLDAMGIVPGMVWQNRDIYYQGPIWAKVPHTDGHFHPSPLMGGFGLKHPPPQIFIKNTPVPANPNTTFSAARINSFLTQYSTGQVAVQIDWEIQKEHSKRWNPEVQFTSNYGTQNSMLWAPDNAGNYHELRAIGSRFLTHHL

SEQ ID NO: 958 - DNA, 2211 bp, Artificial Sequence
  source: /note="Description of Artificial Sequence: Synthetic polynucleotide"
atggctgccgatggttatcttccagattggctcgaggacaacctctctgagggcattcgcgagtggtgggacttgaaacctggagccccgaagcccaaagccaaccagcaaaagcaggacgacggccggggtctggtgcttcctggctacaagtacctcggacccttcaacggactcgacaagggggagcccgtcaacgcggcggacgcagcggccctcgagcacgacaaggcctacgaccagcagctcaaagcgggtgacaatccgtacctgcggtataaccacgccgacgccgagtttcaggagcgtctgcaagaagatacgtcttttgggggcaacctcgggcgagcagtcttccaggccaagaagcgggttctcgaacctctcggtctggttgaggaaggcgctaaggcggctcctggaaagaaacgtccggtagagcagtcgccacaagagccagactcctcctcgggcatcggcaagacaggccagcagcccgctaaaaagagactcaattttggtcagactggcgactcagagtcagtccccgatccacaacctctcggagaacctccagcagccccctcaggtctgggacctaatacaatggcttcaggcggtggcgctccaatggcagacaataacgaaggcgccgacggagtgggtaattcctcgggaaattggcattgcgattccacatggctgggggacagagtcatcaccaccagcacccgaacctgggccctgcccacctacaacaaccacctctacaagcaaatctccaacggcacctcgggaggaagcaccaacgacaacacctattttggctacagcaccccctgggggtattttgacttcaacagattccactgtcacttttcaccacgtgactggcaacgactcatcaacaacaattggggattccggcccaaaagactcaacttcaagctgttcaacatccaggtcaaggaagtcacgacgaacgaaggcaccaagaccatcgccaataatctcaccagcaccgtgcaggtctttacggactcggagtaccagttaccgtacgtgctaggatccgctcaccagggatgtctgcctccgttcccggcggacgtcttcatggttcctcagtacggctatttaactttaaacaatggaagccaagccctgggacgttcctccttctactgtctggagtatttcccatcgcagatgctgagaaccggcaacaactttcagttcagctacaccttcgaggacgtgcctttccacagcagctacgcgcacagccagagcctggacaggctgatgaatcccctcatcgaccagtacctgtactacctggtcagaacgcaaacgactggaactggagggacgcagactctggcattcagccaagcgggtcctagctcaatggccaaccaggctagaaattgggtgcccggaccttgctaccggcagcagcgcgtctccacgacaaccaaccagaacaacaacagcaactttgcctggacgggagctgccaagtttaagctgaacggccgagactctctaatgaatccgggcgtggcaatggcttcccacaaggatgacgacgaccgcttcttcccttcgagcggggtcctgatttttggcaagcaaggagccgggaacgatggagtggattacagccaagtgctgattacagatgaggaagaaatcaaggctaccaaccccgtggccacagaagaatatggagcagtggccatcaacaaccaggccgccaatacgcaggcgcagaccggactcgtgcacaaccagggggtgattcccggcatggtgtggcagaatagagacgtgtacctgcagggtcccatctgggccaaaattcctcacacggacggcaactttcacccgtctcccctgatgggcggctttggactgaagcacccgcctcctcaaattctcatcaagaacacaccggttccagcggacccgccgcttaccttcaaccaggccaagctgaactctttcatcacgcagtacagcaccggacaggtcagcgtggaaatcgagtgggagctgcagaaagaaaacagcaaacgctggaatccagagattcaatacacttccaactactacaaatctacaaatgtggactttgctgtcaacacggagggggtttatagcgagcctcgccccattggcacccgttacctcacccgcaacctgtaa

SEQ ID NO: 959 - DNA, 2592 bp, Artificial Sequence
  source: /note="Description of Artificial Sequence: Synthetic polynucleotide"
ctggctgccgatggttatcttccagattggctcgaggacaacctctctgagggcattcgcgagtggtgggacttgaaacctggagccccgaagcccaaagccaaccagcaaaagcaggacgacggccggggtctggtgcttcctggctacaagtacctcggacccttcaacggactcgacaagggggagcccgtcaacgcggcggacgcagcggccctcgagcacgacaaggcctacgaccagcagctcaaagcgggtgacaatccgtacctgcggtataaccacgccgacgccgagtttcaggagcgtctgcaagaagatacgtcttttgggggcaacctcgggcgagcagtcttccaggccaagaagcgggttctcgaacctctcggtctggttgaggaaggcgctaagatggaagtgcagctccaagccagtggtggcggactggtgcaggcaggaggcagcttgaggctcagctgtgccgccagcggcttcaagatcacccactacaccatgggctggttccggcaggcccctggcaaggagagggagttcgtgagcaggattacctggggtggtgacaacaccttctacagcaacagcgtgaagggcaggttcaccatcagcagggacaacgccaagaacaccgtgtacctgcagatgaacagcctgaagcccgaggacaccgccgactactactgtgcagccggcagtaccagcaccgctacccccctgagggtggactactggggcaaaggcactcaggtgacagtgtcttcaggagggggtggcagcgctcctggaaagaaacgtccggtagagcagtcgccacaagagccagactcctcctcgggcatcggcaagacaggccagcagcccgctaaaaagagactcaattttggtcagactggcgactcagagtcagtccccgatccacaacctctcggagaacctccagcagccccctcaggtctgggacctaatacaatggcttcaggcggtggcgctccaatggcagacaataacgaaggcgccgacggagtgggtaattcctcgggaaattggcattgcgattccacatggctgggggacagagtcatcaccaccagcacccgaacctgggccctgcccacctacaacaaccacctctacaagcaaatctccaacggcacctcgggaggaagcaccaacgacaacacctattttggctacagcaccccctgggggtattttgacttcaacagattccactgtcacttttcaccacgtgactggcaacgactcatcaacaacaattggggattccggcccaaaagactcaacttcaagctgttcaacatccaggtcaaggaagtcacgacgaacgaaggcaccaagaccatcgccaataatctcaccagcaccgtgcaggtctttacggactcggagtaccagttaccgtacgtgctaggatccgctcaccagggatgtctgcctccgttcccggcggacgtcttcatggttcctcagtacggctatttaactttaaacaatggaagccaagccctgggacgttcctccttctactgtctggagtatttcccatcgcagatgctgagaaccggcaacaactttcagttcagctacaccttcgaggacgtgcctttccacagcagctacgcgcacagccagagcctggacaggctgatgaatcccctcatcgaccagtacctgtactacctggtcagaacgcaaacgactggaactggagggacgcagactctggcattcagccaagcgggtcctagctcaatggccaaccaggctagaaattgggtgcccggaccttgctaccggcagcagcgcgtctccacgacaaccaaccagaacaacaacagcaactttgcctggacgggagctgccaagtttaagctgaacggccgagactctctaatgaatccgggcgtggcaatggcttcccacaaggatgacgacgaccgcttcttcccttcgagcggggtcctgatttttggcaagcaaggagccgggaacgatggagtggattacagccaagtgctgattacagatgaggaagaaatcaaggctaccaaccccgtggccacagaagaatatggagcagtggccatcaacaaccaggccgccaatacgcaggcgcagaccggactcgtgcacaaccagggggtgattcccggcatggtgtggcagaatagagacgtgtacctgcagggtcccatctgggccaaaattcctcacacggacggcaactttcacccgtctcccctgatgggcggctttggactgaagcacccgcctcctcaaattctcatcaagaacacaccggttccagcggacccgccgcttaccttcaaccaggccaagctgaactctttcatcacgcagtacagcaccggacaggtcagcgtggaaatcgagtgggagctgcagaaagaaaacagcaaacgctggaatccagagattcaatacacttccaactactacaaatctacaaatgtggactttgctgtcaacacggagggggtttatagcgagcctcgccccattggcacccgttacctcacccgcaacctgtaa

SEQ ID NO: 960 - DNA, 2601 bp, Artificial Sequence
  source: /note="Description of Artificial Sequence: Synthetic polynucleotide"
ctggctgccgatggttatcttccagattggctcgaggacaacctctctgagggcattcgcgagtggtgggacttgaaacctggagccccgaagcccaaagccaaccagcaaaagcaggacgacggccggggtctggtgcttcctggctacaagtacctcggacccttcaacggactcgacaagggggagcccgtcaacgcggcggacgcagcggccctcgagcacgacaaggcctacgaccagcagctcaaagcgggtgacaatccgtacctgcggtataaccacgccgacgccgagtttcaggagcgtctgcaagaagatacgtcttttgggggcaacctcgggcgagcagtcttccaggccaagaagcgggttctcgaacctctcggtctggttgaggaaggcgctaagatggaggtgcagctgcaggcttctggaggaggactggtgcaggctggagggagtctgaggctgtcttgcagtgcctcagtgaggactttctccatctacgccatgggctggtttaggcaggctcccgggaaggagcgcgaattcgtggccggaatcaaccggtctggcgacgtgaccaagtacgctgatttcgtgaaaggccggtttagcatttccagagacaacgccaagaatatggtgtatctgcagatgaactccctgaaacctgaagacacagctctgtactattgtgccgctacttgggcctacgataccgtgggggctctgacatcaggatataatttttggggccaggggacccaggtgacagtgagctccggaggaggaggaagcgctcctggaaagaaacgtccggtagagcagtcgccacaagagccagactcctcctcgggcatcggcaagacaggccagcagcccgctaaaaagagactcaattttggtcagactggcgactcagagtcagtccccgatccacaacctctcggagaacctccagcagccccctcaggtctgggacctaatacaatggcttcaggcggtggcgctccaatggcagacaataacgaaggcgccgacggagtgggtaattcctcgggaaattggcattgcgattccacatggctgggggacagagtcatcaccaccagcacccgaacctgggccctgcccacctacaacaaccacctctacaagcaaatctccaacggcacctcgggaggaagcaccaacgacaacacctattttggctacagcaccccctgggggtattttgacttcaacagattccactgtcacttttcaccacgtgactggcaacgactcatcaacaacaattggggattccggcccaaaagactcaacttcaagctgttcaacatccaggtcaaggaagtcacgacgaacgaaggcaccaagaccatcgccaataatctcaccagcaccgtgcaggtctttacggactcggagtaccagttaccgtacgtgctaggatccgctcaccagggatgtctgcctccgttcccggcggacgtcttcatggttcctcagtacggctatttaactttaaacaatggaagccaagccctgggacgttcctccttctactgtctggagtatttcccatcgcagatgctgagaaccggcaacaactttcagttcagctacaccttcgaggacgtgcctttccacagcagctacgcgcacagccagagcctggacaggctgatgaatcccctcatcgaccagtacctgtactacctggtcagaacgcaaacgactggaactggagggacgcagactctggcattcagccaagcgggtcctagctcaatggccaaccaggctagaaattgggtgcccggaccttgctaccggcagcagcgcgtctccacgacaaccaaccagaacaacaacagcaactttgcctggacgggagctgccaagtttaagctgaacggccgagactctctaatgaatccgggcgtggcaatggcttcccacaaggatgacgacgaccgcttcttcccttcgagcggggtcctgatttttggcaagcaaggagccgggaacgatggagtggattacagccaagtgctgattacagatgaggaagaaatcaaggctaccaaccccgtggccacagaagaatatggagcagtggccatcaacaaccaggccgccaatacgcaggcgcagaccggactcgtgcacaaccagggggtgattcccggcatggtgtggcagaatagagacgtgtacctgcagggtcccatctgggccaaaattcctcacacggacggcaactttcacccgtctcccctgatgggcggctttggactgaagcacccgcctcctcaaattctcatcaagaacacaccggttccagcggacccgccgcttaccttcaaccaggccaagctgaactctttcatcacgcagtacagcaccggacaggtcagcgtggaaatcgagtgggagctgcagaaagaaaacagcaaacgctggaatccagagattcaatacacttccaactactacaaatctacaaatgtggactttgctgtcaacacggagggggtttatagcgagcctcgccccattggcacccgttacctcacccgcaacctgtaa

SEQ ID NO: 961 - DNA, 2367 bp, Artificial Sequence
  source: /note="Description of Artificial Sequence: Synthetic polynucleotide"
ctggctgccgatggttatcttccagattggctcgaggacaacctctctgagggcattcgcgagtggtgggacttgaaacctggagccccgaagcccaaagccaaccagcaaaagcaggacgacggccggggtctggtgcttcctggctacaagtacctcggacccttcaacggactcgacaagggggagcccgtcaacgcggcggacgcagcggccctcgagcacgacaaggcctacgaccagcagctcaaagcgggtgacaatccgtacctgcggtataaccacgccgacgccgagtttcaggagcgtctgcaagaagatacgtcttttgggggcaacctcgggcgagcagtcttccaggccaagaagcgggttctcgaacctctcggtctggttgaggaaggcgctaagatgccaagcagtgtaatcgatgcgctgcagtacaagctggagggcaccacgaggctgaccaggaagaggggtctgaagctggccacggccctcagccttagcaataagttcgtagagggcagccccagcggcggcggcggcagcggcggcggcggcagcgctcctggaaagaaacgtccggtagagcagtcgccacaagagccagactcctcctcgggcatcggcaagacaggccagcagcccgctaaaaagagactcaattttggtcagactggcgactcagagtcagtccccgatccacaacctctcggagaacctccagcagccccctcaggtctgggacctaatacaatggcttcaggcggtggcgctccaatggcagacaataacgaaggcgccgacggagtgggtaattcctcgggaaattggcattgcgattccacatggctgggggacagagtcatcaccaccagcacccgaacctgggccctgcccacctacaacaaccacctctacaagcaaatctccaacggcacctcgggaggaagcaccaacgacaacacctattttggctacagcaccccctgggggtattttgacttcaacagattccactgtcacttttcaccacgtgactggcaacgactcatcaacaacaattggggattccggcccaaaagactcaacttcaagctgttcaacatccaggtcaaggaagtcacgacgaacgaaggcaccaagaccatcgccaataatctcaccagcaccgtgcaggtctttacggactcggagtaccagttaccgtacgtgctaggatccgctcaccagggatgtctgcctccgttcccggcggacgtcttcatggttcctcagtacggctatttaactttaaacaatggaagccaagccctgggacgttcctccttctactgtctggagtatttcccatcgcagatgctgagaaccggcaacaactttcagttcagctacaccttcgaggacgtgcctttccacagcagctacgcgcacagccagagcctggacaggctgatgaatcccctcatcgaccagtacctgtactacctggtcagaacgcaaacgactggaactggagggacgcagactctggcattcagccaagcgggtcctagctcaatggccaaccaggctagaaattgggtgcccggaccttgctaccggcagcagcgcgtctccacgacaaccaaccagaacaacaacagcaactttgcctggacgggagctgccaagtttaagctgaacggccgagactctctaatgaatccgggcgtggcaatggcttcccacaaggatgacgacgaccgcttcttcccttcgagcggggtcctgatttttggcaagcaaggagccgggaacgatggagtggattacagccaagtgctgattacagatgaggaagaaatcaaggctaccaaccccgtggccacagaagaatatggagcagtggccatcaacaaccaggccgccaatacgcaggcgcagaccggactcgtgcacaaccagggggtgattcccggcatggtgtggcagaatagagacgtgtacctgcagggtcccatctgggccaaaattcctcacacggacggcaactttcacccgtctcccctgatgggcggctttggactgaagcacccgcctcctcaaattctcatcaagaacacaccggttccagcggacccgccgcttaccttcaaccaggccaagctgaactctttcatcacgcagtacagcaccggacaggtcagcgtggaaatcgagtgggagctgcagaaagaaaacagcaaacgctggaatccagagattcaatacacttccaactactacaaatctacaaatgtggactttgctgtcaacacggagggggtttatagcgagcctcgccccattggcacccgttacctcacccgcaacctgtaa

SEQ ID NO: 962 - DNA, 2328 bp, Artificial Sequence
  source: /note="Description of Artificial Sequence: Synthetic polynucleotide"
ctggctgccgatggttatcttccagattggctcgaggacaacctctctgagggcattcgcgagtggtgggacttgaaacctggagccccgaagcccaaagccaaccagcaaaagcaggacgacggccggggtctggtgcttcctggctacaagtacctcggacccttcaacggactcgacaagggggagcccgtcaacgcggcggacgcagcggccctcgagcacgacaaggcctacgaccagcagctcaaagcgggtgacaatccgtacctgcggtataaccacgccgacgccgagtttcaggagcgtctgcaagaagatacgtcttttgggggcaacctcgggcgagcagtcttccaggccaagaagcgggttctcgaacctctcggtctggttgaggaaggcgctaagatgtataccatctggatgcccgagaaccccaggcccggtaccccctgcgacatcttcaccaacagcaggggcaagcgagccagcaacggcggcggcggcggcagcggcggcggcggcagcgctcctggaaagaaacgtccggtagagcagtcgccacaagagccagactcctcctcgggcatcggcaagacaggccagcagcccgctaaaaagagactcaattttggtcagactggcgactcagagtcagtccccgatccacaacctctcggagaacctccagcagccccctcaggtctgggacctaatacaatggcttcaggcggtggcgctccaatggcagacaataacgaaggcgccgacggagtgggtaattcctcgggaaattggcattgcgattccacatggctgggggacagagtcatcaccaccagcacccgaacctgggccctgcccacctacaacaaccacctctacaagcaaatctccaacggcacctcgggaggaagcaccaacgacaacacctattttggctacagcaccccctgggggtattttgacttcaacagattccactgtcacttttcaccacgtgactggcaacgactcatcaacaacaattggggattccggcccaaaagactcaacttcaagctgttcaacatccaggtcaaggaagtcacgacgaacgaaggcaccaagaccatcgccaataatctcaccagcaccgtgcaggtctttacggactcggagtaccagttaccgtacgtgctaggatccgctcaccagggatgtctgcctccgttcccggcggacgtcttcatggttcctcagtacggctatttaactttaaacaatggaagccaagccctgggacgttcctccttctactgtctggagtatttcccatcgcagatgctgagaaccggcaacaactttcagttcagctacaccttcgaggacgtgcctttccacagcagctacgcgcacagccagagcctggacaggctgatgaatcccctcatcgaccagtacctgtactacctggtcagaacgcaaacgactggaactggagggacgcagactctggcattcagccaagcgggtcctagctcaatggccaaccaggctagaaattgggtgcccggaccttgctaccggcagcagcgcgtctccacgacaaccaaccagaacaacaacagcaactttgcctggacgggagctgccaagtttaagctgaacggccgagactctctaatgaatccgggcgtggcaatggcttcccacaaggatgacgacgaccgcttcttcccttcgagcggggtcctgatttttggcaagcaaggagccgggaacgatggagtggattacagccaagtgctgattacagatgaggaagaaatcaaggctaccaaccccgtggccacagaagaatatggagcagtggccatcaacaaccaggccgccaatacgcaggcgcagaccggactcgtgcacaaccagggggtgattcccggcatggtgtggcagaatagagacgtgtacctgcagggtcccatctgggccaaaattcctcacacggacggcaactttcacccgtctcccctgatgggcggctttggactgaagcacccgcctcctcaaattctcatcaagaacacaccggttccagcggacccgccgcttaccttcaaccaggccaagctgaactctttcatcacgcagtacagcaccggacaggtcagcgtggaaatcgagtgggagctgcagaaagaaaacagcaaacgctggaatccagagattcaatacacttccaactactacaaatctacaaatgtggactttgctgtcaacacggagggggtttatagcgagcctcgccccattggcacccgttacctcacccgcaacctgtaa

SEQ ID NO: 963 - DNA, 2298 bp, Artificial Sequence
  source: /note="Description of Artificial Sequence: Synthetic polynucleotide"
ctggctgccgatggttatcttccagattggctcgaggacaacctctctgagggcattcgcgagtggtgggacttgaaacctggagccccgaagcccaaagccaaccagcaaaagcaggacgacggccggggtctggtgcttcctggctacaagtacctcggacccttcaacggactcgacaagggggagcccgtcaacgcggcggacgcagcggccctcgagcacgacaaggcctacgaccagcagctcaaagcgggtgacaatccgtacctgcggtataaccacgccgacgccgagtttcaggagcgtctgcaagaagatacgtcttttgggggcaacctcgggcgagcagtcttccaggccaagaagcgggttctcgaacctctcggtctggttgaggaaggcgctaagatgaccttcttctacggcggcagcaggggcaagaggaacaacttcaagaccgaggagtacggcggcggcggcagcggcggcggcggcagcgctcctggaaagaaacgtccggtagagcagtcgccacaagagccagactcctcctcgggcatcggcaagacaggccagcagcccgctaaaaagagactcaattttggtcagactggcgactcagagtcagtccccgatccacaacctctcggagaacctccagcagccccctcaggtctgggacctaatacaatggcttcaggcggtggcgctccaatggcagacaataacgaaggcgccgacggagtgggtaattcctcgggaaattggcattgcgattccacatggctgggggacagagtcatcaccaccagcacccgaacctgggccctgcccacctacaacaaccacctctacaagcaaatctccaacggcacctcgggaggaagcaccaacgacaacacctattttggctacagcaccccctgggggtattttgacttcaacagattccactgtcacttttcaccacgtgactggcaacgactcatcaacaacaattggggattccggcccaaaagactcaacttcaagctgttcaacatccaggtcaaggaagtcacgacgaacgaaggcaccaagaccatcgccaataatctcaccagcaccgtgcaggtctttacggactcggagtaccagttaccgtacgtgctaggatccgctcaccagggatgtctgcctccgttcccggcggacgtcttcatggttcctcagtacggctatttaactttaaacaatggaagccaagccctgggacgttcctccttctactgtctggagtatttcccatcgcagatgctgagaaccggcaacaactttcagttcagctacaccttcgaggacgtgcctttccacagcagctacgcgcacagccagagcctggacaggctgatgaatcccctcatcgaccagtacctgtactacctggtcagaacgcaaacgactggaactggagggacgcagactctggcattcagccaagcgggtcctagctcaatggccaaccaggctagaaattgggtgcccggaccttgctaccggcagcagcgcgtctccacgacaaccaaccagaacaacaacagcaactttgcctggacgggagctgccaagtttaagctgaacggccgagactctctaatgaatccgggcgtggcaatggcttcccacaaggatgacgacgaccgcttcttcccttcgagcggggtcctgatttttggcaagcaaggagccgggaacgatggagtggattacagccaagtgctgattacagatgaggaagaaatcaaggctaccaaccccgtggccacagaagaatatggagcagtggccatcaacaaccaggccgccaatacgcaggcgcagaccggactcgtgcacaaccagggggtgattcccggcatggtgtggcagaatagagacgtgtacctgcagggtcccatctgggccaaaattcctcacacggacggcaactttcacccgtctcccctgatgggcggctttggactgaagcacccgcctcctcaaattctcatcaagaacacaccggttccagcggacccgccgcttaccttcaaccaggccaagctgaactctttcatcacgcagtacagcaccggacaggtcagcgtggaaatcgagtgggagctgcagaaagaaaacagcaaacgctggaatccagagattcaatacacttccaactactacaaatctacaaatgtggactttgctgtcaacacggagggggtttatagcgagcctcgccccattggcacccgttacctcacccgcaacctgtaa

SEQ ID NO: 964 - DNA, 2211 bp, Artificial Sequence
  source: /note="Description of Artificial Sequence: Synthetic polynucleotide"
atggctgccgatggttatcttccagattggctcgaggacaaccttagtgaaggaattcgcgagtggtgggctttgaaacctggagcccctcaacccaaggcaaatcaacaacatcaagacaacgctcgaggtcttgtgcttccgggttacaaataccttggacccggcaacggactcgacaagggggagccggtcaacgcagcagacgcggcggccctcgagcacgacaaggcctacgaccagcagctcaaggccggagacaacccgtacctcaagtacaaccacgccgacgccgagttccaggagcggctcaaagaagatacgtcttttgggggcaacctcgggcgagcagtcttccaggccaaaaagaggcttcttgaacctcttggtctggttgaggaagcggctaaggcggctcctggaaagaagaggcctgtagagcagtctcctcaggaaccggactcctccgcgggtattggcaaatcgggtgcacagcccgctaaaaagagactcaatttcggtcagactggcgacacagagtcagtcccagaccctcaaccaatcggagaacctcccgcagccccctcaggtgtgggatctcttacaatggcttcaggtggtggcgcaccagtggcagacaataacgaaggtgccgatggagtgggtagttcctcgggaaattggcattgcgattcccaatggctgggggacagagtcatcaccaccagcacccgaacctgggccctgcccacctacaacaatcacctctacaagcaaatctccaacagcacatctggaggatcttcaaatgacaacgcctacttcggctacagcaccccctgggggtattttgacttcaacagattccactgccacttctcaccacgtgactggcagcgactcatcaacaacaactggggattccggcctaagcgactcaacttcaagctcttcaacattcaggtcaaagaggttacggacaacaatggagtcaagaccatcgccaataaccttaccagcacggtccaggtcttcacggactcagactatcagctcccgtacgtgctcgggtcggctcacgagggctgcctcccgccgttcccagcggacgttttcatgattcctcagtacgggtatctgacgcttaatgatggaagccaggccgtgggtcgttcgtccttttactgcctggaatatttcccgtcgcaaatgctaagaacgggtaacaacttccagttcaactacgagtttgagaacgtacctttccatagcagctacgctcacagccaaagcctggaccgactaatgaatccactcatcgaccaatacttgtactatctctcaaagactattaacgattctggacagaatcaacaaacgctaaaattcagtgtggccggacccagcaacatggctgtccagggaagaaactacatacctggacccagctaccgacaacaacgtgtctcaaccactgtgactcaaaacaacaacagcgaatttgcttggcctggagcttcttcttgggctctcaatggacgtaatagcttgatgaatcctggacctgctatggccagccacaaagaaggagaggaccgtttctttcctttgtctggatctttaatttttggcaaacaaggaactggaagagacaacgtggatgcggacgaagtcatgataaccaacgaagaagaaattaaaactactaacccggtagcaacggagtcctatggacaagtggccataaaccaccagagtgcccaagcacaggcgcagaccggctgggttcaaaaccaaggaatacttccgggtatggtttggcaggacagagatgtgtacctgcaaggacccatttgggccaaaattcctcacacggacggcaactttcacccttctccgctgatgggagggtttggaatgaagcacccgcctcctcagatcctcatcaaaaacacacctgtacctgcggatcctccaacggccttcaacaaggacaagctgaactctttcatcacccagtattctactggccaagtcagcgtggagatcgagtgggagctgcagaaggaaaacagcaagcgctggaacccggagatccagtacacttccaactattacaagtctaataatgttgaatttgctgttaatactgaaggtgtatatagtgaaccccgccccattggcaccagatacctgactcgtaatctgtaa

SEQ ID NO: 965 - DNA, 2277 bp, Artificial Sequence
  source: /note="Description of Artificial Sequence: Synthetic polynucleotide"
ctggctgccgatggttatcttccagattggctcgaggacaaccttagtgaaggaattcgcgagtggtgggctttgaaacctggagcccctcaacccaaggcaaatcaacaacatcaagacaacgctcgaggtcttgtgcttccgggttacaaataccttggacccggcaacggactcgacaagggggagccggtcaacgcagcagacgcggcggccctcgagcacgacaaggcctacgaccagcagctcaaggccggagacaacccgtacctcaagtacaaccacgccgacgccgagttccaggagcggctcaaagaagatacgtcttttgggggcaacctcgggcgagcagtcttccaggccaaaaagaggcttcttgaacctcttggtctggttgaggaagcggctaagatgaacaaccagaagatcgtgaacctgaaggagaaggtggcccagctggaggccggcggcggcggcagcgctcctggaaagaagaggcctgtagagcagtctcctcaggaaccggactcctccgcgggtattggcaaatcgggtgcacagcccgctaaaaagagactcaatttcggtcagactggcgacacagagtcagtcccagaccctcaaccaatcggagaacctcccgcagccccctcaggtgtgggatctcttacaatggcttcaggtggtggcgcaccagtggcagacaataacgaaggtgccgatggagtgggtagttcctcgggaaattggcattgcgattcccaatggctgggggacagagtcatcaccaccagcacccgaacctgggccctgcccacctacaacaatcacctctacaagcaaatctccaacagcacatctggaggatcttcaaatgacaacgcctacttcggctacagcaccccctgggggtattttgacttcaacagattccactgccacttctcaccacgtgactggcagcgactcatcaacaacaactggggattccggcctaagcgactcaacttcaagctcttcaacattcaggtcaaagaggttacggacaacaatggagtcaagaccatcgccaataaccttaccagcacggtccaggtcttcacggactcagactatcagctcccgtacgtgctcgggtcggctcacgagggctgcctcccgccgttcccagcggacgttttcatgattcctcagtacgggtatctgacgcttaatgatggaagccaggccgtgggtcgttcgtccttttactgcctggaatatttcccgtcgcaaatgctaagaacgggtaacaacttccagttcaactacgagtttgagaacgtacctttccatagcagctacgctcacagccaaagcctggaccgactaatgaatccactcatcgaccaatacttgtactatctctcaaagactattaacgattctggacagaatcaacaaacgctaaaattcagtgtggccggacccagcaacatggctgtccagggaagaaactacatacctggacccagctaccgacaacaacgtgtctcaaccactgtgactcaaaacaacaacagcgaatttgcttggcctggagcttcttcttgggctctcaatggacgtaatagcttgatgaatcctggacctgctatggccagccacaaagaaggagaggaccgtttctttcctttgtctggatctttaatttttggcaaacaaggaactggaagagacaacgtggatgcggacgaagtcatgataaccaacgaagaagaaattaaaactactaacccggtagcaacggagtcctatggacaagtggccataaaccaccagagtgcccaagcacaggcgcagaccggctgggttcaaaaccaaggaatacttccgggtatggtttggcaggacagagatgtgtacctgcaaggacccatttgggccaaaattcctcacacggacggcaactttcacccttctccgctgatgggagggtttggaatgaagcacccgcctcctcagatcctcatcaaaaacacacctgtacctgcggatcctccaacggccttcaacaaggacaagctgaactctttcatcacccagtattctactggccaagtcagcgtggagatcgagtgggagctgcagaaggaaaacagcaagcgctggaacccggagatccagtacacttccaactattacaagtctaataatgttgaatttgctgttaatactgaaggtgtatatagtgaaccccgccccattggcaccagatacctgactcgtaatctgtaa

SEQ ID NO: 966 - DNA, 2313 bp, Artificial Sequence
  source: /note="Description of Artificial Sequence: Synthetic polynucleotide"
ctggctgccgatggttatcttccagattggctcgaggacaaccttagtgaaggaattcgcgagtggtgggctttgaaacctggagcccctcaacccaaggcaaatcaacaacatcaagacaacgctcgaggtcttgtgcttccgggttacaaataccttggacccggcaacggactcgacaagggggagccggtcaacgcagcagacgcggcggccctcgagcacgacaaggcctacgaccagcagctcaaggccggagacaacccgtacctcaagtacaaccacgccgacgccgagttccaggagcggctcaaagaagatacgtcttttgggggcaacctcgggcgagcagtcttccaggccaaaaagaggcttcttgaacctcttggtctggttgaggaagcggctaagatgtataccatctggatgcccgagaaccccaggcccggtaccccctgcgacatcttcaccaacagcaggggcaagcgagccagcaacggcggcggcggcggcagcgctcctggaaagaagaggcctgtagagcagtctcctcaggaaccggactcctccgcgggtattggcaaatcgggtgcacagcccgctaaaaagagactcaatttcggtcagactggcgacacagagtcagtcccagaccctcaaccaatcggagaacctcccgcagccccctcaggtgtgggatctcttacaatggcttcaggtggtggcgcaccagtggcagacaataacgaaggtgccgatggagtgggtagttcctcgggaaattggcattgcgattcccaatggctgggggacagagtcatcaccaccagcacccgaacctgggccctgcccacctacaacaatcacctctacaagcaaatctccaacagcacatctggaggatcttcaaatgacaacgcctacttcggctacagcaccccctgggggtattttgacttcaacagattccactgccacttctcaccacgtgactggcagcgactcatcaacaacaactggggattccggcctaagcgactcaacttcaagctcttcaacattcaggtcaaagaggttacggacaacaatggagtcaagaccatcgccaataaccttaccagcacggtccaggtcttcacggactcagactatcagctcccgtacgtgctcgggtcggctcacgagggctgcctcccgccgttcccagcggacgttttcatgattcctcagtacgggtatctgacgcttaatgatggaagccaggccgtgggtcgttcgtccttttactgcctggaatatttcccgtcgcaaatgctaagaacgggtaacaacttccagttcaactacgagtttgagaacgtacctttccatagcagctacgctcacagccaaagcctggaccgactaatgaatccactcatcgaccaatacttgtactatctctcaaagactattaacgattctggacagaatcaacaaacgctaaaattcagtgtggccggacccagcaacatggctgtccagggaagaaactacatacctggacccagctaccgacaacaacgtgtctcaaccactgtgactcaaaacaacaacagcgaatttgcttggcctggagcttcttcttgggctctcaatggacgtaatagcttgatgaatcctggacctgctatggccagccacaaagaaggagaggaccgtttctttcctttgtctggatctttaatttttggcaaacaaggaactggaagagacaacgtggatgcggacgaagtcatgataaccaacgaagaagaaattaaaactactaacccggtagcaacggagtcctatggacaagtggccataaaccaccagagtgcccaagcacaggcgcagaccggctgggttcaaaaccaaggaatacttccgggtatggtttggcaggacagagatgtgtacctgcaaggacccatttgggccaaaattcctcacacggacggcaactttcacccttctccgctgatgggagggtttggaatgaagcacccgcctcctcagatcctcatcaaaaacacacctgtacctgcggatcctccaacggccttcaacaaggacaagctgaactctttcatcacccagtattctactggccaagtcagcgtggagatcgagtgggagctgcagaaggaaaacagcaagcgctggaacccggagatccagtacacttccaactattacaagtctaataatgttgaatttgctgttaatactgaaggtgtatatagtgaaccccgccccattggcaccagatacctgactcgtaatctgtaa

SEQ ID NO: 967 - DNA, 2283 bp, Artificial Sequence
  source: /note="Description of Artificial Sequence: Synthetic polynucleotide"
ctggctgccgatggttatcttccagattggctcgaggacaaccttagtgaaggaattcgcgagtggtgggctttgaaacctggagcccctcaacccaaggcaaatcaacaacatcaagacaacgctcgaggtcttgtgcttccgggttacaaataccttggacccggcaacggactcgacaagggggagccggtcaacgcagcagacgcggcggccctcgagcacgacaaggcctacgaccagcagctcaaggccggagacaacccgtacctcaagtacaaccacgccgacgccgagttccaggagcggctcaaagaagatacgtcttttgggggcaacctcgggcgagcagtcttccaggccaaaaagaggcttcttgaacctcttggtctggttgaggaagcggctaagatgaccttcttctacggcggcagcaggggcaagaggaacaacttcaagaccgaggagtacggcggcggcggcagcgctcctggaaagaagaggcctgtagagcagtctcctcaggaaccggactcctccgcgggtattggcaaatcgggtgcacagcccgctaaaaagagactcaatttcggtcagactggcgacacagagtcagtcccagaccctcaaccaatcggagaacctcccgcagccccctcaggtgtgggatctcttacaatggcttcaggtggtggcgcaccagtggcagacaataacgaaggtgccgatggagtgggtagttcctcgggaaattggcattgcgattcccaatggctgggggacagagtcatcaccaccagcacccgaacctgggccctgcccacctacaacaatcacctctacaagcaaatctccaacagcacatctggaggatcttcaaatgacaacgcctacttcggctacagcaccccctgggggtattttgacttcaacagattccactgccacttctcaccacgtgactggcagcgactcatcaacaacaactggggattccggcctaagcgactcaacttcaagctcttcaacattcaggtcaaagaggttacggacaacaatggagtcaagaccatcgccaataaccttaccagcacggtccaggtcttcacggactcagactatcagctcccgtacgtgctcgggtcggctcacgagggctgcctcccgccgttcccagcggacgttttcatgattcctcagtacgggtatctgacgcttaatgatggaagccaggccgtgggtcgttcgtccttttactgcctggaatatttcccgtcgcaaatgctaagaacgggtaacaacttccagttcaactacgagtttgagaacgtacctttccatagcagctacgctcacagccaaagcctggaccgactaatgaatccactcatcgaccaatacttgtactatctctcaaagactattaacgattctggacagaatcaacaaacgctaaaattcagtgtggccggacccagcaacatggctgtccagggaagaaactacatacctggacccagctaccgacaacaacgtgtctcaaccactgtgactcaaaacaacaacagcgaatttgcttggcctggagcttcttcttgggctctcaatggacgtaatagcttgatgaatcctggacctgctatggccagccacaaagaaggagaggaccgtttctttcctttgtctggatctttaatttttggcaaacaaggaactggaagagacaacgtggatgcggacgaagtcatgataaccaacgaagaagaaattaaaactactaacccggtagcaacggagtcctatggacaagtggccataaaccaccagagtgcccaagcacaggcgcagaccggctgggttcaaaaccaaggaatacttccgggtatggtttggcaggacagagatgtgtacctgcaaggacccatttgggccaaaattcctcacacggacggcaactttcacccttctccgctgatgggagggtttggaatgaagcacccgcctcctcagatcctcatcaaaaacacacctgtacctgcggatcctccaacggccttcaacaaggacaagctgaactctttcatcacccagtattctactggccaagtcagcgtggagatcgagtgggagctgcagaaggaaaacagcaagcgctggaacccggagatccagtacacttccaactattacaagtctaataatgttgaatttgctgttaatactgaaggtgtatatagtgaaccccgccccattggcaccagatacctgactcgtaatctgtaa

SEQ ID NO: 968 - DNA, 2283 bp, Artificial Sequence
  source: /note="Description of Artificial Sequence: Synthetic polynucleotide"
ctggctgccgatggttatcttccagattggctcgaggacaaccttagtgaaggaattcgcgagtggtgggctttgaaacctggagcccctcaacccaaggcaaatcaacaacatcaagacaacgctcgaggtcttgtgcttccgggttacaaataccttggacccggcaacggactcgacaagggggagccggtcaacgcagcagacgcggcggccctcgagcacgacaaggcctacgaccagcagctcaaggccggagacaacccgtacctcaagtacaaccacgccgacgccgagttccaggagcggctcaaagaagatacgtcttttgggggcaacctcgggcgagcagtcttccaggccaaaaagaggcttcttgaacctcttggtctggttgaggaagcggctaagatggcagctgcggccgccgcggctgcagcggctgcagccgccgcagctgcggctgcagcgggcggcggcggcagcgctcctggaaagaagaggcctgtagagcagtctcctcaggaaccggactcctccgcgggtattggcaaatcgggtgcacagcccgctaaaaagagactcaatttcggtcagactggcgacacagagtcagtcccagaccctcaaccaatcggagaacctcccgcagccccctcaggtgtgggatctcttacaatggcttcaggtggtggcgcaccagtggcagacaataacgaaggtgccgatggagtgggtagttcctcgggaaattggcattgcgattcccaatggctgggggacagagtcatcaccaccagcacccgaacctgggccctgcccacctacaacaatcacctctacaagcaaatctccaacagcacatctggaggatcttcaaatgacaacgcctacttcggctacagcaccccctgggggtattttgacttcaacagattccactgccacttctcaccacgtgactggcagcgactcatcaacaacaactggggattccggcctaagcgactcaacttcaagctcttcaacattcaggtcaaagaggttacggacaacaatggagtcaagaccatcgccaataaccttaccagcacggtccaggtcttcacggactcagactatcagctcccgtacgtgctcgggtcggctcacgagggctgcctcccgccgttcccagcggacgttttcatgattcctcagtacgggtatctgacgcttaatgatggaagccaggccgtgggtcgttcgtccttttactgcctggaatatttcccgtcgcaaatgctaagaacgggtaacaacttccagttcaactacgagtttgagaacgtacctttccatagcagctacgctcacagccaaagcctggaccgactaatgaatccactcatcgaccaatacttgtactatctctcaaagactattaacgattctggacagaatcaacaaacgctaaaattcagtgtggccggacccagcaacatggctgtccagggaagaaactacatacctggacccagctaccgacaacaacgtgtctcaaccactgtgactcaaaacaacaacagcgaatttgcttggcctggagcttcttcttgggctctcaatggacgtaatagcttgatgaatcctggacctgctatggccagccacaaagaaggagaggaccgtttctttcctttgtctggatctttaatttttggcaaacaaggaactggaagagacaacgtggatgcggacgaagtcatgataaccaacgaagaagaaattaaaactactaacccggtagcaacggagtcctatggacaagtggccataaaccaccagagtgcccaagcacaggcgcagaccggctgggttcaaaaccaaggaatacttccgggtatggtttggcaggacagagatgtgtacctgcaaggacccatttgggccaaaattcctcacacggacggcaactttcacccttctccgctgatgggagggtttggaatgaagcacccgcctcctcagatcctcatcaaaaacacacctgtacctgcggatcctccaacggccttcaacaaggacaagctgaactctttcatcacccagtattctactggccaagtcagcgtggagatcgagtgggagctgcagaaggaaaacagcaagcgctggaacccggagatccagtacacttccaactattacaagtctaataatgttgaatttgctgttaatactgaaggtgtatatagtgaaccccgccccattggcaccagatacctgactcgtaatctgtaa

SEQ ID NO: 969 - protein, 726 aa, Artificial Sequence
  source: /note="Description of Artificial Sequence: Synthetic polypeptide"
MEVQLQASGGGLVQAGGSLRLSCAASGFKITHYTMGWFRQAPGKEREFVSRITWGGDNTFYSNSVKGRFTISRDNAKNTVYLQMNSLKPEDTADYYCAAGSTSTATPLRVDYWGKGTQVTVSSGGGGSAPGKKRPVEQSPQEPDSSSGIGKTGQQPAKKRLNFGQTGDSESVPDPQPLGEPPAAPSGLGPNTMASGGGAPMADNNEGADGVGNSSGNWHCDSTWLGDRVITTSTRTWALPTYNNHLYKQISNGTSGGSTNDNTYFGYSTPWGYFDFNRFHCHFSPRDWQRLINNNWGFRPKRLNFKLFNIQVKEVTTNEGTKTIANNLTSTVQVFTDSEYQLPYVLGSAHQGCLPPFPADVFMVPQYGYLTLNNGSQALGRSSFYCLEYFPSQMLRTGNNFQFSYTFEDVPFHSSYAHSQSLDRLMNPLIDQYLYYLVRTQTTGTGGTQTLAFSQAGPSSMANQARNWVPGPCYRQQRVSTTTNQNNNSNFAWTGAAKFKLNGRDSLMNPGVAMASHKDDDDRFFPSSGVLIFGKQGAGNDGVDYSQVLITDEEEIKATNPVATEEYGAVAINNQAANTQAQTGLVHNQGVIPGMVWQNRDVYLQGPIWAKIPHTDGNFHPSPLMGGFGLKHPPPQILIKNTPVPADPPLTFNQAKLNSFITQYSTGQVSVEIEWELQKENSKRWNPEIQYTSNYYKSTNVDFAVNTEGVYSEPRPIGTRYLTRNL

SEQ ID NO: 970 - protein, 729 aa, Artificial Sequence
  source: /note="Description of Artificial Sequence: Synthetic polypeptide"
MEVQLQASGGGLVQAGGSLRLSCSASVRTFSIYAMGWFRQAPGKEREFVAGINRSGDVTKYADFVKGRFSISRDNAKNMVYLQMNSLKPEDTALYYCAATWAYDTVGALTSGYNFWGQGTQVTVSSGGGGSAPGKKRPVEQSPQEPDSSSGIGKTGQQPAKKRLNFGQTGDSESVPDPQPLGEPPAAPSGLGPNTMASGGGAPMADNNEGADGVGNSSGNWHCDSTWLGDRVITTSTRTWALPTYNNHLYKQISNGTSGGSTNDNTYFGYSTPWGYFDFNRFHCHFSPRDWQRLINNNWGFRPKRLNFKLFNIQVKEVTTNEGTKTIANNLTSTVQVFTDSEYQLPYVLGSAHQGCLPPFPADVFMVPQYGYLTLNNGSQALGRSSFYCLEYFPSQMLRTGNNFQFSYTFEDVPFHSSYAHSQSLDRLMNPLIDQYLYYLVRTQTTGTGGTQTLAFSQAGPSSMANQARNWVPGPCYRQQRVSTTTNQNNNSNFAWTGAAKFKLNGRDSLMNPGVAMASHKDDDDRFFPSSGVLIFGKQGAGNDGVDYSQVLITDEEEIKATNPVATEEYGAVAINNQAANTQAQTGLVHNQGVIPGMVWQNRDVYLQGPIWAKIPHTDGNFHPSPLMGGFGLKHPPPQILIKNTPVPADPPLTFNQAKLNSFITQYSTGQVSVEIEWELQKENSKRWNPEIQYTSNYYKSTNVDFAVNTEGVYSEPRPIGTRYLTRNL

SEQ ID NO: 971 - protein, 651 aa, Artificial Sequence
  source: /note="Description of Artificial Sequence: Synthetic polypeptide"
MPSSVIDALQYKLEGTTRLTRKRGLKLATALSLSNKFVEGSPSGGGGSGGGGSAPGKKRPVEQSPQEPDSSSGIGKTGQQPAKKRLNFGQTGDSESVPDPQPLGEPPAAPSGLGPNTMASGGGAPMADNNEGADGVGNSSGNWHCDSTWLGDRVITTSTRTWALPTYNNHLYKQISNGTSGGSTNDNTYFGYSTPWGYFDFNRFHCHFSPRDWQRLINNNWGFRPKRLNFKLFNIQVKEVTTNEGTKTIANNLTSTVQVFTDSEYQLPYVLGSAHQGCLPPFPADVFMVPQYGYLTLNNGSQALGRSSFYCLEYFPSQMLRTGNNFQFSYTFEDVPFHSSYAHSQSLDRLMNPLIDQYLYYLVRTQTTGTGGTQTLAFSQAGPSSMANQARNWVPGPCYRQQRVSTTTNQNNNSNFAWTGAAKFKLNGRDSLMNPGVAMASHKDDDDRFFPSSGVLIFGKQGAGNDGVDYSQVLITDEEEIKATNPVATEEYGAVAINNQAANTQAQTGLVHNQGVIPGMVWQNRDVYLQGPIWAKIPHTDGNFHPSPLMGGFGLKHPPPQILIKNTPVPADPPLTFNQAKLNSFITQYSTGQVSVEIEWELQKENSKRWNPEIQYTSNYYKSTNVDFAVNTEGVYSEPRPIGTRYLTRNL

SEQ ID NO: 972 - protein, 638 aa, Artificial Sequence
  source: /note="Description of Artificial Sequence: Synthetic polypeptide"
MYTIWMPENPRPGTPCDIFTNSRGKRASNGGGGGSGGGGSAPGKKRPVEQSPQEPDSSSGIGKTGQQPAKKRLNFGQTGDSESVPDPQPLGEPPAAPSGLGPNTMASGGGAPMADNNEGADGVGNSSGNWHCDSTWLGDRVITTSTRTWALPTYNNHLYKQISNGTSGGSTNDNTYFGYSTPWGYFDFNRFHCHFSPRDWQRLINNNWGFRPKRLNFKLFNIQVKEVTTNEGTKTIANNLTSTVQVFTDSEYQLPYVLGSAHQGCLPPFPADVFMVPQYGYLTLNNGSQALGRSSFYCLEYFPSQMLRTGNNFQFSYTFEDVPFHSSYAHSQSLDRLMNPLIDQYLYYLVRTQTTGTGGTQTLAFSQAGPSSMANQARNWVPGPCYRQQRVSTTTNQNNNSNFAWTGAAKFKLNGRDSLMNPGVAMASHKDDDDRFFPSSGVLIFGKQGAGNDGVDYSQVLITDEEEIKATNPVATEEYGAVAINNQAANTQAQTGLVHNQGVIPGMVWQNRDVYLQGPIWAKIPHTDGNFHPSPLMGGFGLKHPPPQILIKNTPVPADPPLTFNQAKLNSFITQYSTGQVSVEIEWELQKENSKRWNPEIQYTSNYYKSTNVDFAVNTEGVYSEPRPIGTRYLTRNL

SEQ ID NO: 973 - protein, 628 aa, Artificial Sequence
  source: /note="Description of Artificial Sequence: Synthetic polypeptide"
MTFFYGGSRGKRNNFKTEEYGGGGSGGGGSAPGKKRPVEQSPQEPDSSSGIGKTGQQPAKKRLNFGQTGDSESVPDPQPLGEPPAAPSGLGPNTMASGGGAPMADNNEGADGVGNSSGNWHCDSTWLGDRVITTSTRTWALPTYNNHLYKQISNGTSGGSTNDNTYFGYSTPWGYFDFNRFHCHFSPRDWQRLINNNWGFRPKRLNFKLFNIQVKEVTTNEGTKTIANNLTSTVQVFTDSEYQLPYVLGSAHQGCLPPFPADVFMVPQYGYLTLNNGSQALGRSSFYCLEYFPSQMLRTGNNFQFSYTFEDVPFHSSYAHSQSLDRLMNPLIDQYLYYLVRTQTTGTGGTQTLAFSQAGPSSMANQARNWVPGPCYRQQRVSTTTNQNNNSNFAWTGAAKFKLNGRDSLMNPGVAMASHKDDDDRFFPSSGVLIFGKQGAGNDGVDYSQVLITDEEEIKATNPVATEEYGAVAINNQAANTQAQTGLVHNQGVIPGMVWQNRDVYLQGPIWAKIPHTDGNFHPSPLMGGFGLKHPPPQILIKNTPVPADPPLTFNQAKLNSFITQYSTGQVSVEIEWELQKENSKRWNPEIQYTSNYYKSTNVDFAVNTEGVYSEPRPIGTRYLTRNL

SEQ ID NO: 974 - protein, 621 aa, Artificial Sequence
  source: /note="Description of Artificial Sequence: Synthetic polypeptide"
MNNQKIVNLKEKVAQLEAGGGGSAPGKKRPVEQSPQEPDSSAGIGKSGAQPAKKRLNFGQTGDTESVPDPQPIGEPPAAPSGVGSLTMASGGGAPVADNNEGADGVGSSSGNWHCDSQWLGDRVITTSTRTWALPTYNNHLYKQISNSTSGGSSNDNAYFGYSTPWGYFDFNRFHCHFSPRDWQRLINNNWGFRPKRLNFKLFNIQVKEVTDNNGVKTIANNLTSTVQVFTDSDYQLPYVLGSAHEGCLPPFPADVFMIPQYGYLTLNDGSQAVGRSSFYCLEYFPSQMLRTGNNFQFNYEFENVPFHSSYAHSQSLDRLMNPLIDQYLYYLSKTINDSGQNQQTLKFSVAGPSNMAVQGRNYIPGPSYRQQRVSTTVTQNNNSEFAWPGASSWALNGRNSLMNPGPAMASHKEGEDRFFPLSGSLIFGKQGTGRDNVDADEVMITNEEEIKTTNPVATESYGQVAINHQSAQAQAQTGWVQNQGILPGMVWQDRDVYLQGPIWAKIPHTDGNFHPSPLMGGFGMKHPPPQILIKNTPVPADPPTAFNKDKLNSFITQYSTGQVSVEIEWELQKENSKRWNPEIQYTSNYYKSNNVEFAVNTEGVYSEPRPIGTRYLTRNL

SEQ ID NO: 975 - protein, 633 aa, Artificial Sequence
  source: /note="Description of Artificial Sequence: Synthetic polypeptide"
MYTIWMPENPRPGTPCDIFTNSRGKRASNGGGGGSAPGKKRPVEQSPQEPDSSAGIGKSGAQPAKKRLNFGQTGDTESVPDPQPIGEPPAAPSGVGSLTMASGGGAPVADNNEGADGVGSSSGNWHCDSQWLGDRVITTSTRTWALPTYNNHLYKQISNSTSGGSSNDNAYFGYSTPWGYFDFNRFHCHFSPRDWQRLINNNWGFRPKRLNFKLFNIQVKEVTDNNGVKTIANNLTSTVQVFTDSDYQLPYVLGSAHEGCLPPFPADVFMIPQYGYLTLNDGSQAVGRSSFYCLEYFPSQMLRTGNNFQFNYEFENVPFHSSYAHSQSLDRLMNPLIDQYLYYLSKTINDSGQNQQTLKFSVAGPSNMAVQGRNYIPGPSYRQQRVSTTVTQNNNSEFAWPGASSWALNGRNSLMNPGPAMASHKEGEDRFFPLSGSLIFGKQGTGRDNVDADEVMITNEEEIKTTNPVATESYGQVAINHQSAQAQAQTGWVQNQGILPGMVWQDRDVYLQGPIWAKIPHTDGNFHPSPLMGGFGMKHPPPQILIKNTPVPADPPTAFNKDKLNSFITQYSTGQVSVEIEWELQKENSKRWNPEIQYTSNYYKSNNVEFAVNTEGVYSEPRPIGTRYLTRNL

SEQ ID NO: 976 - protein, 623 aa, Artificial Sequence
  source: /note="Description of Artificial Sequence: Synthetic polypeptide"
MTFFYGGSRGKRNNFKTEEYGGGGSAPGKKRPVEQSPQEPDSSAGIGKSGAQPAKKRLNFGQTGDTESVPDPQPIGEPPAAPSGVGSLTMASGGGAPVADNNEGADGVGSSSGNWHCDSQWLGDRVITTSTRTWALPTYNNHLYKQISNSTSGGSSNDNAYFGYSTPWGYFDFNRFHCHFSPRDWQRLINNNWGFRPKRLNFKLFNIQVKEVTDNNGVKTIANNLTSTVQVFTDSDYQLPYVLGSAHEGCLPPFPADVFMIPQYGYLTLNDGSQAVGRSSFYCLEYFPSQMLRTGNNFQFNYEFENVPFHSSYAHSQSLDRLMNPLIDQYLYYLSKTINDSGQNQQTLKFSVAGPSNMAVQGRNYIPGPSYRQQRVSTTVTQNNNSEFAWPGASSWALNGRNSLMNPGPAMASHKEGEDRFFPLSGSLIFGKQGTGRDNVDADEVMITNEEEIKTTNPVATESYGQVAINHQSAQAQAQTGWVQNQGILPGMVWQDRDVYLQGPIWAKIPHTDGNFHPSPLMGGFGMKHPPPQILIKNTPVPADPPTAFNKDKLNSFITQYSTGQVSVEIEWELQKENSKRWNPEIQYTSNYYKSNNVEFAVNTEGVYSEPRPIGTRYLTRNL

SEQ ID NO: 977 - protein, 623 aa, Artificial Sequence
  source: /note="Description of Artificial Sequence: Synthetic polypeptide"
MAAAAAAAAAAAAAAAAAAAGGGGSAPGKKRPVEQSPQEPDSSAGIGKSGAQPAKKRLNFGQTGDTESVPDPQPIGEPPAAPSGVGSLTMASGGGAPVADNNEGADGVGSSSGNWHCDSQWLGDRVITTSTRTWALPTYNNHLYKQISNSTSGGSSNDNAYFGYSTPWGYFDFNRFHCHFSPRDWQRLINNNWGFRPKRLNFKLFNIQVKEVTDNNGVKTIANNLTSTVQVFTDSDYQLPYVLGSAHEGCLPPFPADVFMIPQYGYLTLNDGSQAVGRSSFYCLEYFPSQMLRTGNNFQFNYEFENVPFHSSYAHSQSLDRLMNPLIDQYLYYLSKTINDSGQNQQTLKFSVAGPSNMAVQGRNYIPGPSYRQQRVSTTVTQNNNSEFAWPGASSWALNGRNSLMNPGPAMASHKEGEDRFFPLSGSLIFGKQGTGRDNVDADEVMITNEEEIKTTNPVATESYGQVAINHQSAQAQAQTGWVQNQGILPGMVWQDRDVYLQGPIWAKIPHTDGNFHPSPLMGGFGMKHPPPQILIKNTPVPADPPTAFNKDKLNSFITQYSTGQVSVEIEWELQKENSKRWNPEIQYTSNYYKSNNVEFAVNTEGVYSEPRPIGTRYLTRNL

SEQ ID NO: 978 - DNA, 2214 bp, Artificial Sequence
  source: /note="Description of Artificial Sequence: Synthetic polynucleotide"
atggctgccgatggttatcttccagattggctcgaggacaacctctctgagggcattcgcgagtggtgggacttgaaacctggagccccgaagcccaaagccaaccagcaaaagcaggacgacggccggggtctggtgcttcctggctacaagtacctcggacccttcaacggactcgacaagggggagcccgtcaacgcggcggacgcagcggccctcgagcacgacaaggcctacgaccagcagctcaaagcgggtgacaatccgtacctgcggtataaccacgccgacgtcgagtttcaggagcgtctgcaagaagatacgtcttttgggggcaacctcgggcgagcagtcttccaggccaagaagagggttctcgaaccttttggtctggttgaggaaggcgctaagacggctcctggaaagaaacgtccggtagagcagtcgccacaagagccagactcctcctcgggcatcggcaagaaaggccaacagcccgccagaaaaagactcaattttggccagactggcgactcagagtcagttccagaccctcaacctctcggagaacctccagcagcgccctctggtgtgggacctaatacaatggctgcaggcggtggcgcaccaatggcagacaataacgagggcgccgacggagtgggtaattcctcgggaaattggcattgcgattccacatggatgggggacagagtcatcaccaccagcacccgaacctgggccctgcccacctacaacaaccacctctacaagcaaatctccaacggcacctcgggaggaagcaccaacgacaacacctattttggctacagcaccccctgggggtattttgatttcaacagattccactgccacttctcaccacgtgactggcagcgactcatcaacaacaactggggattccggccaaaaagactcagcttcaagctcttcaacatccaggtcaaggaggtcacgcagaatgaaggcaccaagaccatcgccaataaccttaccagcacgattcaggtatttacggactcggaataccagctgccatacgtcctcggctccgcgcaccagggctgcctgcctccgttcccggcggacgtcttcatgattccccagtacggctaccttacactgaacaatggaagtcaagccgtaggccgttcctccttctactgcctggaatattttccttctcaaatgctgagaacgggcaacaactttgagttcagctaccagtttgaggacgtgccttttcacagcagctacgcgcacagccaaagcctggaccggctgatgaaccccctcatcgaccagtacctgtactacctgtctcggactcagtccacgggaggtaccgcaagaactcagcagttgctattttctcaggccgggcctaatacaatggccaatcaggcaaagaactggctgccaggaccctgttaccgccaacaacgcgtctcaacgacaaccgggcaaaacaacaatagcaactctgcctggactgctgggaccaaataccatctgaatggaagaaattcattggctaatcctggcatcgctatggcaacacacaaagacgacgaggagcgtttttttcccagtaacgggatcctgatttttggcaaacaaaatgctgccagagacaatgcggattacagcgatgtcatgctcaccagcgaggaagaaatcaaaaccactaaccctgtggctacagaggaatacggtatcgtggcagataacttgcagcagcaaaacacggctcctcaaattggaactgtcaacagccagggggccttacccggtatggtctggcagaaccgggacgtgtacctgcagggtcccatctgggccaagattcctcacacggacggcaacttccacccatctccgctgatgggcggctttggcctgaaacatcctccgcctcagatcctgatcaagaacacgcctgtacctgcggatcctccgaccaccttcaaccagtcaaagctgaactctttcatcacgcaatacagcaccggacaggtcagcgtggaaattgaatgggagctacagaaggaaaacagcaagcgctggaaccccgagatccagtacacctccaactactacaaatctacaagtgtggactttgctgttaatacagaaggcgtgtactctgaaccccgccccattggcacccgttacctcacccgtaatctgtaa

SEQ ID NO: 979 - DNA, 2214 bp, Artificial Sequence
  source: /note="Description of Artificial Sequence: Synthetic polynucleotide"
atggctgccgatggttatcttccagattggctcgaggacaacctctctgagggcattcgcgagtggtgggcgctgaaacctggagccccgaagcccaaagccaaccagcaaaagcaggacgacggccggggtctggtgcttcctggctacaagtacctcggacccttcaacggactcgacaagggggagcccgtcaacgcggcggacgcagcggccctcgagcacgacaaggcctacgaccagcagctcaaagcgggtgacaatccgtacctgcggtataaccacgccgacgccgagtttcaggagcgtctgcaagaagatacgtcttttgggggcaacctcgggcgagcagtcttccaggccaagaagcgggttctcgaacctctcggtctggttgaggacggcgctaagacggctcctggaaagaagagaccagtagagcagtcaccccaagaaccagactcctcctcgggcatcggcaagaaaggccaacagcccgccagaaaaagactcaattttggccagactggcgactcagagtcagttccagaccctcaacctctcggagaacctccagcaacccccgctgctgtgggacctactacaatggcttcaggcggtggcgcaccaatggcagacaataacgaaggcgccgacggagtgggtagttcctcgggaaattggcattgcgattccacatggctgggcgacagagtcatcaccaccagcacccgaacctgggccctgcccacctacaacaaccacctctacaagcaaatctccaacgggacatcgggaggagccaccaacgacaacacctacttcggctacagcaccccctgggggtattttgactttaacagattccactgccacttttcaccacgtgactggcagcgactcatcaacaacaactggggattccggcccaagagactcagcttcaagctcttcaacatccaggtcaaggaggtcacgcagaatgaaggcaccaagaccatcgccaataacctcaccagcaccatccaggtgtttacggactcggagtaccagctgccgtacgttctcggctctgcccaccagggctgcctgcctccgttcccggcggacgtgttcatgattccccagtacggctacctaacactcaacaacggtagtcaggccgtgggacgctcctccttctactgcctggaatactttccttcgcagatgctgagaaccggcaacaacttccagtttacttacaccttcgaggacgtgcctttccacagcagctacgcccacagccagagcttggaccggctgatgaatcctctgattgaccagtacctgtactacttgtctcggactcaaacaacaggaggcacggcaaatacgcagactctgggcttcagccaaggtgggcctaatacaatggccaatcaggcaaagaactggctgccaggaccctgttaccgccaacaacgcgtctcaacgacaaccgggcaaaacaacaatagcaactttgcctggactgctgggaccaaataccatctgaatggaagaaattcattggctaatcctggcatcgctatggcaacacacaaggacgacgaggagcgtttttttcccagtaacgggatcctgatttttggcaaacaaaatgctgccagagacaatgcggattacagcgatgtcatgctcaccagcgaggaagaaatcaaaaccactaaccctgtggctacagaggaatacggtatcgtggcagataacttgcagcagcaaaacacggctcctcaaattggaactgtcaacagccagggggccttacccggtatggtctggcagaaccgggacgtgtacctgcagggtcccatctgggccaagattcctcacacggacggcaacttccacccgtctccgctgatgggcggctttggcctgaaacatcctccgcctcagatcctgatcaagaacacgcctgtacctgcggatcctccgaccaccttcaaccagtcaaagctgaactctttcatcacgcaatacagcaccggacaggtcagcgtggaaatcgagtgggagctgcagaaagaaaacagcaagcgctggaaccccgagatccagtacacctccaactactacaaatctacaaatgtggactttgctgtcaacacggagggggtttatagcgagcctcgccccattggcacccgttacctcacccgcaacctgtaa

SEQ ID NO: 980 - DNA, 2211 bp, Artificial Sequence
  source: /note="Description of Artificial Sequence: Synthetic polynucleotide"
  modified_base (715)..(715): a, c, g, or t
atggctgccgatggttatcttccagattggctcgaggacaacctctctgagggcattcgcgagtggtgggcgctgaaacctggagccccgaagcccaaagccaaccagcaaaagcaggacgacggccggggtctggtgcttcctggctacaagtacctcggacccttcaacggactcgacaagggggagcccgtcaacgcggcggacgcagcggccctcgagcacgacaaggcctacgaccagcagctcaaagcgggtgacaatccgtacctgcggtataaccacgccgacgccgagtttcaggagcgtctgcaagaagatacgtcttttgggggcaacctcgggcgagcagtcttccaggccaagaagcgggttctcgaacctctcggtctggttgaggaaggcgctaagacggctcctggaaagaaacgtccggtagagcagtcgccacaagagccagactcctcctcgggcatcggcaagacaggccagcagcccgctaaaaagaggctcaattttggtcagactggcgactcagagtcagtccccgacccacaacctctcggagaacctccagcaacccccgctgctgtgggacctactacaatggcttcaggcggtggcgcaccaatggcagacaataacgaaggcgccgacggagtgggtaatgcctcaggaaattggcattgcgattccacatggctgggcgacagantcatcaccaccagcacccgaacatgggccttgcccacctataacaaccacctctacaagcaaatctccagtgcttcaacgggggccagcaacgacaaccactacttcggctacagcaccccctgggggtattttgatttcaacagattccactgccatttctcaccacgtgactggcagcgactcatcaacaacaattggggattccggcccaagagactcaacttcaagctcttcaacatccaagtcaaggaggtcacgcagaatgaaggcaccaagaccatcgccaataacctcaccagcaccatccaggtgtttacggactcggagtaccagctgccgtacgttctcggctctgcccaccagggctgcctgcctccgttcccggcggacgtgttcatgattccccagtacggctacctaacactcaacaacggtagtcaggccgtgggacgctcctccttctactgcctggaatattttccatctcaaatgctgcgaactggaaacaattttgaattcagctacaccttcgaggacgtgcctttccacagcagctacgcacacagccagagcttggaccgactgatgaatcctctcatcgaccagtacctgtactacttgtctcggactcaaacaacaggaggcacggcaaatacgcagactctgggcttcagccaaggtgggcctaatacaatggccaatcaggcaaagaactggctgccaggaccctgttaccgccaacaacgcgtctcaacgacaaccgggcaaaacaacaatagcaactttgcctggactgctgggaccaaataccatctgaatggaagaaattcattggctaatcctggcatcgctatggcaacacacaaagacgacgaggagcgtttttttcccagtaacgggatcctgatttttggcaaacaaaatgctgccagagacaatgcggattacagcgatgtcatgctcaccagcgaggaagaaatcaaaaccactaaccctgtggctacagaggaatacggtatcgtggcagataacttgcagcagcaaaacacggctcctcaaattggaactgtcaacagccaggggaccttacccggtatggtctggcagaaccgggacgtgtacctgcagggtcccatctgggccaagattcctcacacggacggcaacttccacccgtctccgctgatgggcggctttggcctgaaacatcctccgcctcagatcctgatcaagaacacgcctgtacctgcggatcctccgaccaccttcaaccagtcaaagctgaactctttcatcacgcaatacagcaccggacaggtcagcgtggaaattgaatgggagctacagaaggaaaacagcaagcgctggaaccccgagatccagtacacctccaattactacaaatctacaagtgtggactttgctgttaatacagaaggcgtgtactctgaaccccgccccattggcacgcgtttcctcacccgtaatctgtaa

SEQ ID NO: 981 - DNA, 2214 bp, Artificial Sequence
  source: /note="Description of Artificial Sequence: Synthetic polynucleotide"
atggctgccgatggttatcttccagattggctcgaggacaacctctctgagggcattcgcgagtggtgggcgctgaaacctggagccccgaagcccaaagccaaccagcaaaagcaggacgacggccggggtctggtgcttcctggctacaagtacctcggacccttcaacggactcgacaagggggagcccgtcaacgcggcggacgcagcggccctcgagcacgacaaggcctacgaccagcagctcaaagcgggtgacaatccgtacctgcggtataaccacgccgacgccgagtttcaggagcgtctgcaagaagatacgtcttttgggggcaacctcgggcgagcagtcttccaggccaagaagcgggttctcgaacctctcggtctggttgaggaaggcgctaagacggctcctggaaagaaacgtccggtagagcagtcgccacaagagccagactcctcctcgggcatcggcaagacaggccagcagcccgctaaaaagaggctcaattttggccagactggcgactcagagtcagttccagaccctcaacctctcggagaacctccagcagcgccctctggtgtgggacctaatacaatggctgcaggcggtggcgcaccaatggcagacaataacgaaggcgccgacggagtgggtagttcctcgggaaattggcattgcgattccacatggctgggcgacagagtcatcaccaccagcacccgaacctgggccctgcccacctacaacaaccacctctacaagcaaatctccaacgggacatcgggaggagccaccaacgacaacacctacttcggctacagcaccccctgggggtattttgactttaacagattccactgccacttttcaccacgtgactggcagcgactcatcaacaacaactggggattccggcccaagagactcagcttcaagctcttcaacatccaggtcaaggaggtcacgcagaatgaaggcaccaagaccatcgccaataacctcaccagcaccatccaggtgtttacggactcggagtaccagctgccgtacgtactaggatccgctcaccagggatgtctgcctccgttcccggcggacgtgttcatgattccccagtacggctacctaacactcaacaacggtagtcaggccgtgggacgctcctccttctactgcctggaatattttccatctcagatgctgagaacgggcaataactttaccttcagctacaccttcgaggacgtgcctttccacagcagctatgcccacagccagagcttggaccggctgatgaatcctctgattgaccagtacctgtactacttgtctcggactcaaacaacaggaggcacggcaaatacgcagactctgggcttcagccaaggtgggcctaatacaatggccaatcaggcaaagaactggctgccaggaccctgttaccgccaacaacgcgtctcaacgacaaccgggcaaaacaacaatagcaactttgcctggactgctgggaccaaataccatctgaatggaagaaattcattggctaatcctggcatcgctatggcaacacacaaagacgacgaggagcgtttttttcccagtaacgggatcctgatttttggcaaacaaaatgctgccagagacaatgcggattacagcgatgtcatgctcaccagcgaggaagaaatcaaaaccactaaccctgtggctacagaggaatacggtatcgtggcagataacttgcagcagcaaaacacggctcctcaaattggaactgtcaacagccagggggccttacccggtatggtctggcagaaccgggacgtgtacctgcagggtcccatctgggccaagattcctcacacggacggcaacttccacccgtctccgctaatgggaggatttggactgaagcacccacctcctcagatcctgatcaagaacacgccggtacctgcggatcctccgaccaccttcaaccagtcaaagctgtactctttcatcacgcaatacagcaccggacaggtcagcgtggaaattgaatgggagctgcagaaggaaaacagcaagcgctggaaccccgagatccaatacacctccaactactacaaatctacaagtgtggactttgctgttaatacagaaggcgtgtactctgaaccccgccccattggcacccgttacctcacccgtaatctgtaa

SEQ ID NO: 982 - protein, 737 aa, Artificial Sequence
  source: /note="Description of Artificial Sequence: Synthetic polypeptide"
MAADGYLPDWLEDNLSEGIREWWDLKPGAPKPKANQQKQDDGRGLVLPGYKYLGPFNGLDKGEPVNAADAAALEHDKAYDQQLKAGDNPYLRYNHADVEFQERLQEDTSFGGNLGRAVFQAKKRVLEPFGLVEEGAKTAPGKKRPVEQSPQEPDSSSGIGKKGQQPARKRLNFGQTGDSESVPDPQPLGEPPAAPSGVGPNTMAAGGGAPMADNNEGADGVGNSSGNWHCDSTWMGDRVITTSTRTWALPTYNNHLYKQISNGTSGGSTNDNTYFGYSTPWGYFDFNRFHCHFSPRDWQRLINNNWGFRPKRLSFKLFNIQVKEVTQNEGTKTIANNLTSTIQVFTDSEYQLPYVLGSAHQGCLPPFPADVFMIPQYGYLTLNNGSQAVGRSSFYCLEYFPSQMLRTGNNFEFSYQFEDVPFHSSYAHSQSLDRLMNPLIDQYLYYLSRTQSTGGTARTQQLLFSQAGPNTMANQAKNWLPGPCYRQQRVSTTTGQNNNSNSAWTAGTKYHLNGRNSLANPGIAMATHKDDEERFFPSNGILIFGKQNAARDNADYSDVMLTSEEEIKTTNPVATEEYGIVADNLQQQNTAPQIGTVNSQGALPGMVWQNRDVYLQGPIWAKIPHTDGNFHPSPLMGGFGLKHPPPQILIKNTPVPADPPTTFNQSKLNSFITQYSTGQVSVEIEWELQKENSKRWNPEIQYTSNYYKSTSVDFAVNTEGVYSEPRPIGTRYLTRNL

SEQ ID NO: 983 - protein, 737 aa, Artificial Sequence
  source: /note="Description of Artificial Sequence: Synthetic polypeptide"
MAADGYLPDWLEDNLSEGIREWWALKPGAPKPKANQQKQDDGRGLVLPGYKYLGPFNGLDKGEPVNAADAAALEHDKAYDQQLKAGDNPYLRYNHADAEFQERLQEDTSFGGNLGRAVFQAKKRVLEPLGLVEDGAKTAPGKKRPVEQSPQEPDSSSGIGKKGQQPARKRLNFGQTGDSESVPDPQPLGEPPATPAAVGPTTMASGGGAPMADNNEGADGVGSSSGNWHCDSTWLGDRVITTSTRTWALPTYNNHLYKQISNGTSGGATNDNTYFGYSTPWGYFDFNRFHCHFSPRDWQRLINNNWGFRPKRLSFKLFNIQVKEVTQNEGTKTIANNLTSTIQVFTDSEYQLPYVLGSAHQGCLPPFPADVFMIPQYGYLTLNNGSQAVGRSSFYCLEYFPSQMLRTGNNFQFTYTFEDVPFHSSYAHSQSLDRLMNPLIDQYLYYLSRTQTTGGTANTQTLGFSQGGPNTMANQAKNWLPGPCYRQQRVSTTTGQNNNSNFAWTAGTKYHLNGRNSLANPGIAMATHKDDEERFFPSNGILIFGKQNAARDNADYSDVMLTSEEEIKTTNPVATEEYGIVADNLQQQNTAPQIGTVNSQGALPGMVWQNRDVYLQGPIWAKIPHTDGNFHPSPLMGGFGLKHPPPQILIKNTPVPADPPTTFNQSKLNSFITQYSTGQVSVEIEWELQKENSKRWNPEIQYTSNYYKSTNVDFAVNTEGVYSEPRPIGTRYLTRNL

SEQ ID NO: 984 - protein, 736 aa, Artificial Sequence
  source: /note="Description of Artificial Sequence: Synthetic polypeptide"
  MOD_RES (239)..(239): Any naturally occurring amino acid
MAADGYLPDWLEDNLSEGIREWWALKPGAPKPKANQQKQDDGRGLVLPGYKYLGPFNGLDKGEPVNAADAAALEHDKAYDQQLKAGDNPYLRYNHADAEFQERLQEDTSFGGNLGRAVFQAKKRVLEPLGLVEEGAKTAPGKKRPVEQSPQEPDSSSGIGKTGQQPAKKRLNFGQTGDSESVPDPQPLGEPPATPAAVGPTTMASGGGAPMADNNEGADGVGNASGNWHCDSTWLGDRXITTSTRTWALPTYNNHLYKQISSASTGASNDNHYFGYSTPWGYFDFNRFHCHFSPRDWQRLINNNWGFRPKRLNFKLFNIQVKEVTQNEGTKTIANNLTSTIQVFTDSEYQLPYVLGSAHQGCLPPFPADVFMIPQYGYLTLNNGSQAVGRSSFYCLEYFPSQMLRTGNNFEFSYTFEDVPFHSSYAHSQSLDRLMNPLIDQYLYYLSRTQTTGGTANTQTLGFSQGGPNTMANQAKNWLPGPCYRQQRVSTTTGQNNNSNFAWTAGTKYHLNGRNSLANPGIAMATHKDDEERFFPSNGILIFGKQNAARDNADYSDVMLTSEEEIKTTNPVATEEYGIVADNLQQQNTAPQIGTVNSQGTLPGMVWQNRDVYLQGPIWAKIPHTDGNFHPSPLMGGFGLKHPPPQILIKNTPVPADPPTTFNQSKLNSFITQYSTGQVSVEIEWELQKENSKRWNPEIQYTSNYYKSTSVDFAVNTEGVYSEPRPIGTRFLTRNL

SEQ ID NO: 985 - protein, 737 aa, Artificial Sequence
  source: /note="Description of Artificial Sequence: Synthetic polypeptide"
MAADGYLPDWLEDNLSEGIREWWALKPGAPKPKANQQKQDDGRGLVLPGYKYLGPFNGLDKGEPVNAADAAALEHDKAYDQQLKAGDNPYLRYNHADAEFQERLQEDTSFGGNLGRAVFQAKKRVLEPLGLVEEGAKTAPGKKRPVEQSPQEPDSSSGIGKTGQQPAKKRLNFGQTGDSESVPDPQPLGEPPAAPSGVGPNTMAAGGGAPMADNNEGADGVGSSSGNWHCDSTWLGDRVITTSTRTWALPTYNNHLYKQISNGTSGGATNDNTYFGYSTPWGYFDFNRFHCHFSPRDWQRLINNNWGFRPKRLSFKLFNIQVKEVTQNEGTKTIANNLTSTIQVFTDSEYQLPYVLGSAHQGCLPPFPADVFMIPQYGYLTLNNGSQAVGRSSFYCLEYFPSQMLRTGNNFTFSYTFEDVPFHSSYAHSQSLDRLMNPLIDQYLYYLSRTQTTGGTANTQTLGFSQGGPNTMANQAKNWLPGPCYRQQRVSTTTGQNNNSNFAWTAGTKYHLNGRNSLANPGIAMATHKDDEERFFPSNGILIFGKQNAARDNADYSDVMLTSEEEIKTTNPVATEEYGIVADNLQQQNTAPQIGTVNSQGALPGMVWQNRDVYLQGPIWAKIPHTDGNFHPSPLMGGFGLKHPPPQILIKNTPVPADPPTTFNQSKLYSFITQYSTGQVSVEIEWELQKENSKRWNPEIQYTSNYYKSTSVDFAVNTEGVYSEPRPIGTRYLTRNL

SEQ ID NO: 986 - DNA, 2208 bp, Artificial Sequence
  source: /note="Description of Artificial Sequence: Synthetic polynucleotide"
atggctgccgatggttatcttccagattggctcgaggacaacctctctgagggcattcgcgagtggtgggacttgaaacctggagccccgaaacccaaagccaaccagcaaaagcaggacgacggccggggtctggtgcttcctggctacaagtacctcggacccttcaacggactcgacaagggggagcccgtcaacgcggcggatgcagcggccctcgagcacgacaaagcctacgaccggcagctcgacagcggagacaacccgtacctcaagtacaaccacgccgacgcggagtttcaggagcgccttaaagaagatacgtcttttgggggcaacctcggacgagcagtcttccaggccaagaagagggttctcgaaccttttggtctggttgaggaaggtgctaagacggctcctggaaagaaacgtccggtagagcagtcgccacaagagccagactcctcctcgggcattggcaagacaggccagcagcccgctaaaaagagactcaattttggtcagactggcgactcagagtcagtccccgacccacaacctctcggagaacctccagcaacccccgctgctgtgggacctactacaatggcttcaggtggtggcgcaccagtggcagacaataacgaaggcgccgacggagtgggtagttcctcgggaaattggcattgcgattccacatggctgggcgacagagtcatcaccaccagcacccgaacatgggccttgcccacctataacaaccacctctacaagcaaatctccagtgcttcgacgggggccagcaacgacaaccactacttcggctacagcaccccctgggggtattttgatttcaacaggttccactgccatttctcaccacgtgactggcagcgactcatcaacaacaattggggattccggcccaaaagactcaacttcaagctgttcaacatccaggtcaaggaagtcacgacgaacgaaggcaccaagaccatcgccaataatctcaccagcaccgtgcaggtctttacggactcggagtaccagttaccgtacgtgctaggatccgctcaccagggatgtctgcctccgttcccggcggacgtcttcatggttcctcagtacggctatttaactttaaacaatggaagccaagccctgggacgttcctccttctactgtctggagtatttcccatcgcagatgctgagaacgggcaacaactttacctttagctacaccttcgaggacgtgcctttccacagcagctacgcgcacagccagagcctggacaggctgatgaatcccctcatcgaccagtacctgtactacctggtcagaacgcaaacgactggaactggagggacgcagactctggcattcagccaagcgggtcctagctcaatggccaaccaggctagaaattgggtgcccggaccttgctaccggcagcagcgcgtctccacgacaaccaaccagaacaacaacagcaactttgcctggacgggagctgccaagtttaagctgaacggccgagactctctaatgaatccgggcgtggcaatggcttcccacaaggatgacgacgaccgcttcttcccttcgagcggggtcctgatttttggcaagcaaggagccgggaacgatggagtggattacagccaagtgctgattacagatgaggaagaaatcaaggctaccaaccccgtggccacagaagaatatggagcagtggccatcaacaaccaggccgccaatacgcaggcgcagaccggactcgtgcacaaccagggggtgattcccggcatggtgtggcagaatagagacgtgtacctgcagggtcccatctgggccaaaattcctcacacggacggcaactttcacccgtctcccctgatgggcggctttggactgaagcacccgcctcctcaaattctcatcaagaacacaccggttccagcggacccgccgcttaccttcaaccaggccaagctgaactctttcatcacgcagtacagcaccggacaggtcagcgtggaaatcgagtgggagctgcagaaagaaaacagcaaacgctggaatccagagattcaatacacttccaactactacaaatctacaaatgtggactttgctgtcaacacggagggggtttatagcgagcctcgccccattggcacccgttacctcacccgcaacctgtaa

SEQ ID NO: 987 - DNA, 2211 bp, Artificial Sequence
  source: /note="Description of Artificial Sequence: Synthetic polynucleotide"
  modified_base (337)..(337): a, c, g, or t
atggctgccgatggttatcttccagattggctcgaggacactctctctgaaggaataagacagtggtggaagctcaaacctggcccaccaccaccaaagcccgcagagcggcataaggacgacagcaggggtcttgtgcttcctggctacaagtacctcggacccttcaacggactcgacaagggggagcccgtcaacgcggcggacgcagcgaccctcgagcacgacaaggcctacgaccagcagctcaaagcgggtgacaatccgtacctgcggtataaccacgccgacgccgagtttcaggagcgtctgcaagaagatacgtcttttgggggcnacctcgggcgagcagtcttccaggccaagaagcgggttctcgaacctctcggtctggttgaggaagctgctaagacggctcctggaaagaagagaccagtagagccatcaccccagcgttctccagactcctctacgggcatcggcaagaaaggccaacagcccgccagaaaaagactcaattttggtcagactggcgactcagagtcagttccagaccctcaacctctcggagaacctccagcagcgccctctggtgtgggacctaatacaatggctgcaggcggtggcgcaccaatggcagacaataacgaaggcgccgacggagtgggtagttcctcgggaaattggcattgcgattccacatggctgggcgacagagtcatcaccaccagcacccgaacctgggccctgcccacctacaacaaccacctctacaagcaaatctccagtgcttcaacgggggccagcaacgacaaccactacttcggctacagcaccccctgggggtattttgatttcaacagattccactgccatttctcaccacgtgactggcagcgactcatcaacaacaattggggattccggcccaagagactcaacttcaagctcttcaacatccaagtcaaggaggtcacgacgaatgatggcgtcacgaccatcgctaataaccttaccagcacggttcaagtcttctcggactcagactatcagctcccgtacgtgctcgggtcggctcacgagggctgcctcccgccgttcccagcggacgttttcatgattcctcagtacggctatttaactttaaacaatggaagccaagccctgggacgttcctccttctactgtctggagtatttcccatcgcagatgctgagaaccggcaacaactttcagttcagctacaccttcgaggacgtgcctttccacagcagctacgcgcacagccagagcctggacaggctgatgaatcccctcatcgaccagtacctgtactacctggtcagaacgcaaacgactggaactggagggacgcagactctggcattcagccaagcgggtcctagctcaatggccaaccaggctagaaattgggtgcccggaccttgctaccggcagcagcgcgtctccacgacaaccaaccagaacaacaacagcaactttgcctggacgggagctgccaagtttaagctgaacggccgagactctctaatgaatccgggcgtggcaatggcttcccacaaggatgacgacgaccgcttcttcccttcgagcggggtcctgatttttggcaagcaaggagccgggaacgatggagtggattacagccaagtgctgattacagatgaggaagaaatcaaggctaccaaccccgtagccacagaagaatatggagcagtggccatcaacaaccaggccgccaatacgcaggcgcagaccggactcgtgcacaaccagggggtgattcccggaatggtgtggcaagacagagacgtatacctgcagggtcctatttgggccaaaattcctcacacggatggacactttcacccgtctcctctcatgggcggctttggacttaagcacccgcctcctcagatcctcatcaaaaacacgcctgttcctgcgaatcctccggcagagttttcggctacaaagtttgcttcattcatcacccagtattccacaggacaagtgagcgtggagattgaatgggagctgcagaaagaaaacagcaaacgctggaatcccgaagtgcagtatacatctaactatgcaaaatctgccaacgttgatttcactgtggacaacaatggactttatactgagcctcgccccattggcacccgttacctcacccgtcccctgtaa

SEQ ID NO: 988 - DNA, 2214 bp, Artificial Sequence
  source: /note="Description of Artificial Sequence: Synthetic polynucleotide"
  modified_base (335)..(335): a, c, g, or t
atgactgacggttaccttccagattggctagaggacaacctctctgaaggcgttcgagagtggtgggcgctgcaacctggagccccgaagcccaaagccaaccagcaaaagcaggacgacggccggggtctggtgcttcctggctacaagtacctcggacccttcaacggactcgacaagggggagcccgtcaacgcggcggacgcagcggccctcgagcacgacaaggcctacgaccagcagctcaaagcgggtgacaatccgtacctgcggtataaccacgccgacgccgagtttcaggagcgtctgcaagaagatacgtcttttgggggcancctcgggcgagcagtcttccaggccaagaagcgggttctcgaacctctcggtctggttgaggaaggcgctaagacggctcctggaaagaaacgtccggtagagccatcaccccagcgttctccagactcctctacgggcatcggcaagaaaggccaacagcccgccagaaaaagactcaattttggtcagactggcgactcagagtcagttccagaccctcaacctctcggagaacctccagcagcgccctcaggtgtgggatctcttacaatggcttcaggtggtggcgcaccagtggcagacaataacgaaggtgccgatggagtgggtagttcctcgggaaattggcattgcgattcccaatggctgggggacagagtcatcaccaccagcacccgaacctgggccctgcccacctacaacaatcacctctacaagcaaatctccaacagcacatctggaggatcttcaaatgacaacgcctacttcggctacagcaccccctgggggtattttgacttcaacagattccactgccacttctcaccacgtgactggcagcgactcatcaacaacaactggggattccggcccaagagactcagcttcaagctcttcaacatccaggtcaaggaggtcacgcagaatgaaggcaccaagaccatcgccaataacctcaccagcaccatccaggtgtttacggactcggagtaccagctgccgtacgttctcggctctgcccaccagggctgcctgcctccgttcccggcggacgtgttcatgattccccagtacggctacctaacactcaacaacggtagtcaggccgtgggacgctcctccttctactgcctggaatactttccttcgcagatgctgagaaccggcaacaacttccagtttacttacaccttcgaggacgtgcctttccacagcagctacgcccacagccagagcttggaccggctgatgaatcctctgattgaccagtacctgtactacttgtctcggactcaaacaacaggaggcacggcaaatacgcagactctgggcttcagccaaggtgggcctaatacaatggccaatcaggcaaagaactggctgccaggaccctgttaccgccaacaacgcgtctcaacgacaaccgggcaaaacaacaatagcaactttgcctggactgctgggaccaaataccatctgaatggaagaaattcattggctaatcctggcatcgctatggcaacacacaaagacgacgaggagcgtttttttcccagtaacgggatcctgatttttggcaaacaaaatgctgccagagacaatgcggattacagcgatgtcatgctcaccagcgaggaagaaatcaaaaccactaaccctgtggctacagaggaatacggtatcgtggcagataacttgcagcagcaaaacacggctcctcaaattggaactgtcaacagccagggggccttacccggtatggtctggcagaaccgggacgtgtacctgcagggtcccatctgggccaagattcctcacacggacggcaacttccacccgtctccgctgatgggcggctttggcctgaaacatcctccgcctcagatcctgatcaagaacacgcctgtacctgcggatcctccgaccaccttaaaccaggccaagctgaactctttcatcacgcaatacagcaccggacaggtcagcgtggaaattgaatgggagctgcagaaggaaaacagcaagcgctggaacccagagattcagtacacttcaaactactacaaatctacaaatgtggactttgctgtcaatacagagggaacttatagtgaaccccgccccattggcaccagatttctgactcgtaatctgtaa

SEQ ID NO: 989 - DNA, 2211 bp, Artificial Sequence
  source: /note="Description of Artificial Sequence: Synthetic polynucleotide"
  modified_base (338)..(338): a, c, g, or t
atggctgccgatggttatcttccagattggctcgaggacactctctctgaaggaataagacagtggtggaagctcaaacctggcccaccaccaccaaagcccgcagagcggcataaggacgacagcaggggtcttgtgcttcctgggtacaagtacctcggccccttcaacggactcgacaagggggagcccgtcaacgcggcggacgcagcggccctcgagcacgacaaggcctacgaccagcagctcgaagcgggtgacaatccgtacctgcggtataaccacgccgacgccgagtttcaggagcgtctgcaagaagatacgtcttttgggggcancctcgggcgagcagtcttccaggccaagaagcgggttctcgaacctctcggtctggttgaggaaggcgctaagacggctcctggaaagaagagaccagtagagcagtcaccccaagaaccagactcctcctcgggcatcggcaggaaaggccaacagcccgccagaaaaagactcaattttggccagactggcgactcagagtcagttccagaccctcaacctctcggagaacctccagcagcgccctctggtgtgggacctaatacaatggcttcaggcggtggcgctccaatggcagacaataacgaaggcgccgacggagtgggtaatgcctcaggaaattggcattgcgattccacatggctgggcgacagagtcatcaccaccagcacccgcacctgggccttgcccacctacaataaccacctctacaagcaaatctccagtgcttcaacgggggccagcaacgacaaccactacttcggctacagcaccccctgggggtattttgatttcaacagattccactgccacttttcaccacgtgactggcagcgactcatcaacaacaattggggattccggcccaagagactcaacttcaaactcttcaacatccaggtcaaggaggtcacgcagaatgaaggcactaagaccatcgccaataaccttaccagcacgattcaggtatttacggactcggaataccagctgccgtacgtcctcggctccgcgcaccagggctgcctgcctccgttcccggcggacgtcttcatgattccccagtacggctaccttacactgaacaatggaagtcaagccgtaggccgttcctccttctactgcctggaatattttccatctcaaatgctgcgaactggcaacaacttccagtttacctacaccttcgaggacgtgcctttccacagcagctacgcccacagccagagcttggaccggctgatgaatcctctgattgaccagtacctgtactacttgtctcggactcagtccacaggaggaactcaaggtacccagcaattgttattttctcaagctgggcctgcaaacatgtcggctcaggctaagaactggctacctggaccttgctaccggcagcagcgagtctctacgacactgtcgcaaaacaacaacagcaactttgcttggactggtgccaccaaatatcacctgaacggaagagactctttggtaaatcccggtgtcgccatggcaacccacaaggacgacgaggaacgcttcttcccgtcgagtggagtcctgatgtttggaaaacagggtgctggaagagacaatgtggactacagcagcgttatgctaaccagcgaagaagaaattaaaaccactaaccctgtagccacagaacaatacggtgtggtggttgataacttgcagcaaaccaatacggggcctattgtgggaaatgtcaacagccaaggagccttacctggtatggtctggcagaaccgggacgtgtacctgcagggtcccatctgggccaagattcctcacacggacggcaacttccacccgtctccgctgatgggcggctttggcctgaaacatcctccgcctcagatcctcatcaaaaacacacctgtacctgcggatcctccaacggccttcaacaaggacaagctgaactctttcatcacccagtattctactggccaagtcagcgtggagatcgagtgggagctgcagaaggaaaacagcaagcgctggaacccggagatccagtacacttccaactattacaagtctaataatgttgaatttgctgttaatactgaaggtgtatatagtgaaccccgccccattggcaccagatacctgactcgtaatctgtaa

SEQ ID NO: 990 - protein, 735 aa, Artificial Sequence
  source: /note="Description of Artificial Sequence: Synthetic polypeptide"
MAADGYLPDWLEDNLSEGIREWWDLKPGAPKPKANQQKQDDGRGLVLPGYKYLGPFNGLDKGEPVNAADAAALEHDKAYDRQLDSGDNPYLKYNHADAEFQERLKEDTSFGGNLGRAVFQAKKRVLEPFGLVEEGAKTAPGKKRPVEQSPQEPDSSSGIGKTGQQPAKKRLNFGQTGDSESVPDPQPLGEPPATPAAVGPTTMASGGGAPVADNNEGADGVGSSSGNWHCDSTWLGDRVITTSTRTWALPTYNNHLYKQISSASTGASNDNHYFGYSTPWGYFDFNRFHCHFSPRDWQRLINNNWGFRPKRLNFKLFNIQVKEVTTNEGTKTIANNLTSTVQVFTDSEYQLPYVLGSAHQGCLPPFPADVFMVPQYGYLTLNNGSQALGRSSFYCLEYFPSQMLRTGNNFTFSYTFEDVPFHSSYAHSQSLDRLMNPLIDQYLYYLVRTQTTGTGGTQTLAFSQAGPSSMANQARNWVPGPCYRQQRVSTTTNQNNNSNFAWTGAAKFKLNGRDSLMNPGVAMASHKDDDDRFFPSSGVLIFGKQGAGNDGVDYSQVLITDEEEIKATNPVATEEYGAVAINNQAANTQAQTGLVHNQGVIPGMVWQNRDVYLQGPIWAKIPHTDGNFHPSPLMGGFGLKHPPPQILIKNTPVPADPPLTFNQAKLNSFITQYSTGQVSVEIEWELQKENSKRWNPEIQYTSNYYKSTNVDFAVNTEGVYSEPRPIGTRYLTRNL

SEQ ID NO: 991 - protein, 736 aa, Artificial Sequence
  source: /note="Description of Artificial Sequence: Synthetic polypeptide"
  MOD_RES (113)..(113): Any naturally occurring amino acid
MAADGYLPDWLEDTLSEGIRQWWKLKPGPPPPKPAERHKDDSRGLVLPGYKYLGPFNGLDKGEPVNAADAATLEHDKAYDQQLKAGDNPYLRYNHADAEFQERLQEDTSFGGXLGRAVFQAKKRVLEPLGLVEEAAKTAPGKKRPVEPSPQRSPDSSTGIGKKGQQPARKRLNFGQTGDSESVPDPQPLGEPPAAPSGVGPNTMAAGGGAPMADNNEGADGVGSSSGNWHCDSTWLGDRVITTSTRTWALPTYNNHLYKQISSASTGASNDNHYFGYSTPWGYFDFNRFHCHFSPRDWQRLINNNWGFRPKRLNFKLFNIQVKEVTTNDGVTTIANNLTSTVQVFSDSDYQLPYVLGSAHEGCLPPFPADVFMIPQYGYLTLNNGSQALGRSSFYCLEYFPSQMLRTGNNFQFSYTFEDVPFHSSYAHSQSLDRLMNPLIDQYLYYLVRTQTTGTGGTQTLAFSQAGPSSMANQARNWVPGPCYRQQRVSTTTNQNNNSNFAWTGAAKFKLNGRDSLMNPGVAMASHKDDDDRFFPSSGVLIFGKQGAGNDGVDYSQVLITDEEEIKATNPVATEEYGAVAINNQAANTQAQTGLVHNQGVIPGMVWQDRDVYLQGPIWAKIPHTDGHFHPSPLMGGFGLKHPPPQILIKNTPVPANPPAEFSATKFASFITQYSTGQVSVEIEWELQKENSKRWNPEVQYTSNYAKSANVDFTVDNNGLYTEPRPIGTRYLTRPL

SEQ ID NO: 992 - protein, 737 aa, Artificial Sequence
  source: /note="Description of Artificial Sequence: Synthetic polypeptide"
  MOD_RES (112)..(112): Any naturally occurring amino acid
MTDGYLPDWLEDNLSEGVREWWALQPGAPKPKANQQKQDDGRGLVLPGYKYLGPFNGLDKGEPVNAADAAALEHDKAYDQQLKAGDNPYLRYNHADAEFQERLQEDTSFGGXLGRAVFQAKKRVLEPLGLVEEGAKTAPGKKRPVEPSPQRSPDSSTGIGKKGQQPARKRLNFGQTGDSESVPDPQPLGEPPAAPSGVGSLTMASGGGAPVADNNEGADGVGSSSGNWHCDSQWLGDRVITTSTRTWALPTYNNHLYKQISNSTSGGSSNDNAYFGYSTPWGYFDFNRFHCHFSPRDWQRLINNNWGFRPKRLSFKLFNIQVKEVTQNEGTKTIANNLTSTIQVFTDSEYQLPYVLGSAHQGCLPPFPADVFMIPQYGYLTLNNGSQAVGRSSFYCLEYFPSQMLRTGNNFQFTYTFEDVPFHSSYAHSQSLDRLMNPLIDQYLYYLSRTQTTGGTANTQTLGFSQGGPNTMANQAKNWLPGPCYRQQRVSTTTGQNNNSNFAWTAGTKYHLNGRNSLANPGIAMATHKDDEERFFPSNGILIFGKQNAARDNADYSDVMLTSEEEIKTTNPVATEEYGIVADNLQQQNTAPQIGTVNSQGALPGMVWQNRDVYLQGPIWAKIPHTDGNFHPSPLMGGFGLKHPPPQILIKNTPVPADPPTTLNQAKLNSFITQYSTGQVSVEIEWELQKENSKRWNPEIQYTSNYYKSTNVDFAVNTEGTYSEPRPIGTRFLTRNL

SEQ ID NO: 993 - protein, 736 aa, Artificial Sequence
  source: /note="Description of Artificial Sequence: Synthetic polypeptide"
  MOD_RES (113)..(113): Any naturally occurring amino acid
MAADGYLPDWLEDTLSEGIRQWWKLKPGPPPPKPAERHKDDSRGLVLPGYKYLGPFNGLDKGEPVNAADAAALEHDKAYDQQLEAGDNPYLRYNHADAEFQERLQEDTSFGGXLGRAVFQAKKRVLEPLGLVEEGAKTAPGKKRPVEQSPQEPDSSSGIGRKGQQPARKRLNFGQTGDSESVPDPQPLGEPPAAPSGVGPNTMASGGGAPMADNNEGADGVGNASGNWHCDSTWLGDRVITTSTRTWALPTYNNHLYKQISSASTGASNDNHYFGYSTPWGYFDFNRFHCHFSPRDWQRLINNNWGFRPKRLNFKLFNIQVKEVTQNEGTKTIANNLTSTIQVFTDSEYQLPYVLGSAHQGCLPPFPADVFMIPQYGYLTLNNGSQAVGRSSFYCLEYFPSQMLRTGNNFQFTYTFEDVPFHSSYAHSQSLDRLMNPLIDQYLYYLSRTQSTGGTQGTQQLLFSQAGPANMSAQAKNWLPGPCYRQQRVSTTLSQNNNSNFAWTGATKYHLNGRDSLVNPGVAMATHKDDEERFFPSSGVLMFGKQGAGRDNVDYSSVMLTSEEEIKTTNPVATEQYGVVVDNLQQTNTGPIVGNVNSQGALPGMVWQNRDVYLQGPIWAKIPHTDGNFHPSPLMGGFGLKHPPPQILIKNTPVPADPPTAFNKDKLNSFITQYSTGQVSVEIEWELQKENSKRWNPEIQYTSNYYKSNNVEFAVNTEGVYSEPRPIGTRYLTRNL

SEQ ID NO: 994 - DNA, 2211 bp, Artificial Sequence
  source: /note="Description of Artificial Sequence: Synthetic polynucleotide"
atggccgccgacggctacctgcccgactggctggaggacaacctgagcgagggcatccgcgagtggtgggccctgaagcccggcgccccccagcccaaggccaaccagcagcaccaggacaacgcccgcggcctggtgctgcccggctacaagtacctgggccccggcaacggcctggacaagggcgagcccgtgaacgccgccgacgccgccgccctggagcacgacaaggcctacgaccagcagctgaaggccggcgacaacccctacctgaagtacaaccacgccgacgccgagttccaggagcgcctgaaggaggacaccagcttcggcggcaacctgggccgcgccgtgttccaggccaagaagcgcctgctggagcccctgggcctggtggaggaggccgccaagaccgcccccggcaagaagcgccccgtggagcagagcccccaggagcccgacagcagcgccggcatcggcaagagcggcgcccagcccgccaagaagcgcctgaacttcggccagaccggcgacaccgagagcgtgcccgacccccagcccatcggcgagccccccgccgcccccagcggcgtgggcagcctgaccatggccagcggcggcggcgcccccgtggccgacaacaacgagggcgccgacggcgtgggcagcagcagcggcaactggcactgcgacagccagtggctgggcgaccgcgtgatcaccaccagcacccgcacctgggccctgcccacctacaacaaccacctgtacaagcagatcagcaacagcaccagcggcggcagcagcaacgacaacgcctacttcggctacagcaccccctggggctacttcgacttcaaccgcttccactgccacttcagcccccgcgactggcagcgcctgatcaacaacaactggggcttccgccccaagcgcctgaacttcaagctgttcaacatccaggtgaaggaggtgaccgacaacaacggcgtgaagaccatcgccaacaacctgaccagcaccgtgcaggtgttcaccgacagcgactaccagctgccctacgtgctgggcagcgcccacgagggctgcctgccccccttccccgccgacgtgttcatgatcccccagtacggctacctgaccctgaacgacggcagccaggccgtgggccgcagcagcttctactgcctggagtacttccccagccagatgctgcgcaccggcaacaacttccagttcagctacgagttcgagaacgtgcccttccacagcagctacgcccacagccagagcctggaccgcctgatgaaccccctgatcgaccagtacctgtactacctgagcaagaccatcaacggcagcggccagaaccagcagaccctgaagttcagcgtggccggccccagcaacatggccgtgcagggccgcaactacatccccggccccagctaccgccagcagcgcgtgagcaccaccgtgacccagaacaacaacagcgagttcgcctggcccggcgccagcagctgggccctgaacggccgcaacagcctgatgaaccccggccccgccatggccagccacaaggagggcgaggaccgcttcttccccctgagcggcagcctgatcttcggcaagcagggcaccggccgcgacaacgtggacgccgacaaggtgatgatcaccaacgaggaggagatcaagaccaccaaccccgtggccaccgagagctacggccaggtggccaccaaccaccagagcgcccaggcccaggcccagaccggctgggtgcagaaccagggcatcctgcccggcatggtgtggcaggaccgcgacgtgtacctgcagggccccatctgggccaagatcccccacaccgacggcaacttccaccccagccccctgatgggcggcttcggcatgaagcacccccccccccagatcctgatcaagaacacccccgtgcccgccgacccccccaccgccttcaacaaggacaagctgaacagcttcatcacccagtacagcaccggccaggtgagcgtggagatcgagtgggagctgcagaaggagaacagcaagcgctggaaccccgagatccagtacaccagcaactactacaagagcaacaacgtggagttcgccgtgaacaccgagggcgtgtacagcgagccccgccccatcggcacccgctacctgacccgcaacctgtaa

SEQ ID NO: 995 - DNA, 2211 bp, Artificial Sequence
  source: /note="Description of Artificial Sequence: Synthetic polynucleotide"
atggctgccgatggttatcttccagattggctcgaggacactctctctgaaggaataagacagtggtggaagctcaaacctggcccaccaccaccaaagcccgcagagcggcataaggacgacagcaggggtcttgtgcttcctgggtacaagtacctcggacccttcaacggactcgacaagggagagccggtcaacgaggcagacgccgcggccctcgagcacgacaaggcctacgaccagcagctcaaggccggagacaacccgtacctcaagtacaaccacgccgacgccgagttccaggagcggctcaaagaagatacgtcttttgggggcaacctcggacgagcagtcttccaggccaagaagcgggttctcgaacctctcggtctggttgaggaaggcgctaagacggctcctggaaagaaacgtccggtagagcagtcgccacaagagccagactcctcctcgggcattggcaagacaggccagcagcccgctaaaaagagactcaattttggtcagactggcgactcagagtcagtccccgacccacaacctctcggagaacctccagcaacccccgctgctgtgggacctactacaatggcttcaggcggtggcgcaccaatggcggacaataacgaaggcgccgatggagtgggtagttcctcgggaaattggcattgcgattcccaatggctgggggacagagtcatcaccaccagcacccgaacatgggccttgcccacctataacaaccacctctacaagcaaatctccagtgcttcaacgggggccagcaacgacaaccactacttcggctacagcaccccctgggggtattttgacttcaacagattccactgccacttctcaccacgtgactggcagcgactcatcaacaacaactggggattccgacccaagagactcaacttcaagctctttaacattcaagtcaaggaggtcacgcagaatgaaggcaccaagaccatcgccaataacctcaccagcaccatccaggtgtttacggactcggagtaccagctgccgtacgttctcggctccgcccaccagggctgcctgcctccgttcccggcggacgtgttcatgattccccagtacggctacctaacactcaacaacggtagtcaggccgtgggacgctcctccttctactgcctggaatactttccttcgcagatgctgagaaccggcaacaacttccagtttacttacaccttcgaggacgtgcctttccacagcagctacgcccacagccagagcttggaccggctgatgaatcctctgattgaccagtacctgtactacttgtctcggactcaaacaacaggaggcacggcaaatacgcagactctgggcttcagccaaggtgggcctaatacaatggccaatcaggcaaagaactggctgccaggaccctgttaccgccaacaacgcgtctcaacgacaaccgggcaaaacaacaatagcaactttgcctggactgctgggaccaaataccatctgaatggaagaaattcattggctaatcctggcatcgctatggcaacacacaaagacgacaaggagcgtttttttcccagtaacgggatcctgatttttggcaaacaaaatgctgccagagacaatgcggattacagcgatgtcatgctcaccagcgaggaagaaatcaaaaccactaaccctgtggctacagaggaatacggtatcgtggcagataacttgcagcagcaaaacacggctcctcaaattggaactgtcaacagccagggggccttacccggtatggtctggcagaaccgggacgtgtacctgcagggtcccatctgggccaagattcctcacacggacggcaacttccacccgtctccgctgatgggcggctttggcctgaaacatcctccgcctcagatcctgatcaagaacacgcctgtacctgcggatcctccgaccaccttcaaccagtcaaagctgaactctttcatcacgcaatacagcaccggacaggtcagcgtggaaattgaatgggagctgcagaaagaaaacagcaaacgctggaacccagagattcaatacacttccaactactacaaatctacaagtgtggactttgctgttaatacagaaggcgtgtactctgaaccccaccccattggcacccgttacctcacccgtcccctgtaa

SEQ ID NO: 996 - DNA, 2211 bp, Artificial Sequence
  source: /note="Description of Artificial Sequence: Synthetic polynucleotide"
atggctgccgatggttatcttccagattggctcgaggacaacctctctgagggcattcgcgagtggtgggcgctgaaacctggagccccgaagcccaaagccaaccagcaaaagcaggacgacggccggggtctggtgcttcctggctacaagtacctcggacccttcaacggactcgacaagggggagccggtcaacgcagcagacgcggcggccctcgagcacgacaaggcctacgaccagcagctcaaggccggagacaacccgtacctcaagtacaaccacgccgacgccgagttccaggagcggctcaaagaagatacgtcttttgggggcaacctcgggcgagcagtcttccaggccaaaaagaggcttcttgaacctcttggtctggttgaggaagcggctaagacggctcctggaaagaagaggcctgtagagcagtctcctcaggaaccggactcctccgcgggtattggcaaatcgggtgcacagcccgctaaaaagagactcaattttggtcagactggcgactcagagtcagtccccgacccacaacctctcggagaacctccagcaacccccgctgctgtgggacctactacaatggcttcaggcggtggcgcaccaatggcagacaataacgaaggcgccgacggagtgggtaatgcctcaggaaattggcattgcgattccacatggctgggcgacagagtcatcaccaccagcacccgaacctgggccctgcccacctacaataaccacctctacaagcaaatctccagtgcttcaacgggggccagcaacgacaaccactacttcggctacagcaccccctgggggtattttgatttcaacagattccactgccacttttcaccacgtgactggcagcgactcatcaacaacaattggggattccggcccaagagactcaacttcaaactcttcaacatccaagtcaaggaggtcacgcagaatgaaggcaccaagaccatcgccaataacctcaccagcaccatccaggtgtttacggactcggagtaccagctgccgtacgttctcggctctgcccaccagggctgcctgcctccgttcccggcggacgtgttcatgattccccagtacggctacctaacactcaacaacggtagtcaggccgtgggacgctcctccttctactgcctggaatactttccttcgcagatgctgagaaccggcaacaacttccagtttacttacaccttcgaggacgtgcctttccacagcagctacgcccacagccagagcttggaccggctgatgaatcctctgattgaccagtacctgtactacttgtctcggactcaaacaacaggaggcacggcaaatacgcagactctgggcttcagccaaggtgggcctaatacaatggccaatcaggcaaagaactggctgccaggaccctgttaccgccaacaacgcgtctcaacgacaaccgggcaaaacaacaatagcaactttgcctggactgctgggaccaaataccatctgaatggaagaaattcattggctaatcctggcatcgctatggcaacacacaaagacgacaaggagcgtttttttcccagtaacgggatcctgatttttggcaaacaaaatgctgccagagacaatgcggattacagcgatgtcatgctcaccagcgaggaagaaatcaaagccactaaccctgtggctacagaggaatacggtatcgtggcagataacttgcagcagcaaaacacggctcctcaaattggaactgtcaacagccagggggccttacccggtatggtttggcagaaccgggacgtgtacctgcagggtcccatctgggccaagattcctcacacggacggcaacttccacccgtctccgctgatgggcggctttggcctgaaacatcctccgcctcagatcctgatcaagaacacgcctgtacctgcggatcctccgaccaccttcaaccagtcaaagctgaactctttcatcacgcaatacagcaccggacaggtcagcgtggaaattgaatgggagctgcagaaggaaaacagcaagcgctggaaccccgagatccagtacacctccaactactacaaatctacaagtgtggactttgctgttaatacagaaggcgtgtactctgaaccccaccccattggcacccgttacctcacccgtcccctgtaa

SEQ ID NO: 997 - DNA, 2214 bp, Artificial Sequence
  source: /note="Description of Artificial Sequence: Synthetic polynucleotide"
atggctgccgatggttatcttccagattggctcgaggacaacctctctgagggcattcgcgagtggtgggacttgaaacctggagccccgaagcccaaagccaaccagcaaaagcaggacgacggccggggtctggtgcttcctggctacaagtacctcggacccttcaacggactcgacaagggggagcccgtcaacgcggcggacgcagcggccctcgagcacgacaaggcctacgaccagcagctcaaagcgggtgacaatccgtacctgcggtataaccacgccgacgccgagtttcaggagcgtctgcaagaagatacgtcttttgggggcaacctcgggcgagcagtcttccaggccaagaagcgggttctcgaacctctcggtctggttgaggaaggcgctaatacggctcctggaaagaaacgtccggtagagcagtcgccacaagagccagactcctccgcgggtattggcaaatcgggtgcacagcccgctaaaaagagactcaatttcggtcagactggcgacacagagtcagtcccagaccctcaaccaatcggagaacctcccgcagccccctcaggtgtgggatctcttacaatggcttcaggtggtggcgcaccagtggcagacaataacgaaggtgccgatggagtgggtagttcctcgggaaattggcattgcgattcccaatggctgggggacagagtcatcaccaccagcacccgaacctgggccctgcccacctacaacaatcacctctacaagcaaatctccaacagcacatctggaggatcttcaaatgacaacgcctacttcggctacagcaccccctgggggtattttgacttcaacagattccactgccacttctcaccacgtgactggcagcgactcatcaacaacaactggggattccggcctaagcgactcaacttcaagctcttcaacattcaggtcaaagaggttacggacaacaatggagtcaagaccatcgccaataacctcaccagcaccatccaggtgtttacggactcggagtaccagctgccgtacgttctcggctccgcccaccagggctgcctgcctccgttcccggcggacgtgttcatgattccccagtacggctacctaacactcaacaacggtagtcaggccgtgggacgctcctccttctactgcctggaatactttccttcgcagatgctgagaaccggcaacaacttccagtttacttacaccttcgaggacgtgcctttccacagcagctacgcccacagccagagcttggaccggctgatgaatcctctgattgaccagtacctgtactacttgtctcggactcaaacaacaggaggcacggcaaatacgcagactctgggcttcagccaaggtgggcctaatacaatggccaatcaggcaaagaactggctgccaggaccctgttaccgccaacaacgcgtctcaacgacaaccgggcaaaacaacaatagcaactttgcctggactgctgggaccaaataccatctgaatggaagaaattcattggctaatcctggcatcgctatggcctcacacaaagacgacaaggagcgtttttttcccagtaacgggatcctgatttttggcaaacaaaatgctgccagagacaatgcggattacagcgatgtcatgctcaccagcgaggaagaaatcaaaaccactaaccctgtggctacagaggaatacggtatcgtggcagataacttgcagcagcaaaacacggctcctcaaattggaactgtcaacagtcaaggagccttacctggcatggtctggcagaaccgggacgtgtacctgcagggtcccatctgggccaagattcctcacacggacggcaacttccacccgtctccgctgatgggcggctttggcctgaaacatcctccgcctcagatcctgatcaagaacacgcctgtacctgcggatcctccgaccaccttcaaccagtcaaagctgaactctttcatcacgcaatacagcaccggacaggtcagcgtggaaattgaatgggagctgcagaaggaaaacagcaagcgctggaaccccgagatccagtacaccaccaactactacaaatctacaagtgtggactttgctgttaatacagaaggcgtgtactctgaaccccaccccattggcacccgttacctcacccgtcccctgtaa

SEQ ID NO: 998 - DNA, 2211 bp, Artificial Sequence
  source: /note="Description of Artificial Sequence: Synthetic polynucleotide"
atggctgccgatggttatcttccagattggctcgaggacaacctctctgagggcattcgcgagtggtgggcgctgaaacctggagccccgaagcccaaagccaaccagcaaaagcaggacgacggccggggtctggtgcttcctggctacaagtacctcggacccttcaacggactcgacaaaggagagccggtcaacgaggcggacgcggcagccctcgaacacgacaaagcttacgaccagcagctcaaggccggtgacaatccgtacctgcggtataaccacgccgacgccgagtttcaggagcgtcttcaagaagatacgtcttttgggggcaacctcgggcgagcagtcttccaggccaagaagcgggttctcgaacctctcggtctggttgaggaaggcgctaagacggctcctggaaagaaacgtccggtagagcagtcgccacaagagccagactcctcctcgggcatcggcaagacaggccagcagcccgctaaaaagagactcaattttggtcagactggcgactcagagtcagtccccgacccacaacctctcggagaacctccagcaacccccgctgctgtgggacctactacaatggcttcaggcggtggcgcaccaatggcagacaataacgaaggcgccgacggagtgggtaatgcctcaggaaattggcattgcgattccacatggctgggcgacagagtcatcaccaccagcacccgcacctgggccttgcccacctacaataaccacctctacaagcaaatctccagtgcttcaacgggggccagcaacgacaaccactacttcggctacagcaccccctgggggtattttgactttaacagattccactgccacttttcaccacgtgactggcaaagactcatcaacaacaactggggattccggcccaagagactcaacttcaagctcttcaacatccaggtcaaggaggtcacgcagaatgaaggcaccaagaccatcgccaataaccttaccagcacgattcaggtctttacggactcggaataccagctcccgtacgtcctcggctctgcgcaccagggctgcctccctccgttcccggcggacgtgttcatgattccgcagtacggctacctaacactcaacaacggtagtcaggccgtgggacgctcctccttctactgcctggaatactttccttcgcagatgctgagaaccggcaacaacttccagtttacttacaccttcgaggacgtgcctttccacagcagctacgcccacagccagagcttggaccggctgatgaatcctctgattgaccagtacctgtactacttgtctcggactcaaacaacaggaggcacggcaaatacgcagactctgggcttcagccaaggtgggcctaatacaatggccaatcaggcaaagaactggctgccaggaccctgttaccgccaacaacgcgtctcaacgacaaccgggcaaaacaacaatagcaactttgcctggactgctgggaccaaataccatctgaatggaagaaattcattggctaatcctggcatcgctatggcaacacacaaagacgacaaggagcgtttttttcccagtaacgggatcctgatttttggcaaacaaaatgctgccagagacaatgcggattacagcgatgtcatgctcaccagcgaggaagaaatcaaaaccactaaccctgtggctacagaggaatacggtatcgtggcagataacttgcagcagcaaaacacggctcctcaaattggaactgtcaacagccagggggccttacccggtatggtctggcagaaccgggacgtgtacctgcagggtcccatctgggccaagattcctcacacggacggcaacttccacccgtctccgctgatgggcggctttggcctgaaacatcctccgcctcagatcctgatcaagaacacgcctgtacctgcggatcctccgaccaccttcaaccagtcaaagctgaactctttcatcacgcaatacagcaccggacaggtcagcgtggaaattgaatgggagctgcagaaggaaaacagcaagcgctggaaccccgagatccagtacacctccaactactacaaatctacaagtgtggactttgctgttaatacagaaggcgtgtactctgaaccccaccccattggcacccgttacctcacccgtcccctgtaa

SEQ ID NO: 999 - DNA, 2211 bp, Artificial Sequence
  source: /note="Description of Artificial Sequence: Synthetic polynucleotide"
atggctgccgatggttatcttccagattggctcgaggacaacctctctgagggcattcgcgagtggtgggcgctgaaacctggagccccgaagcccaaagccaaccagcaaaagcaggacgacggccggggtctggtgcttcctggctacaagtacctcggacccttcaacggactcgacaaaggagagccggtcaacgaggcggacgcggcagccctcgaacacgacaaagcttacgaccagcagctcaaagcgggtgacaatccgtacctgcggtataaccacgccgacgccgagtttcaggagcgtctgcaagaagatacgtcttttgggggcaacctcgggcgagcagtcttccaggccaagaagagggttctcgaaccttttggtctggttgaggaaggtgctaagacggctcctggaaagaaacgtccggtagagcagtcgccacaagagccagactcctcctcgggcattggcaagacaggccagcagcccgctaaaaagagactcaattttggtcagactggcgactcagagtcagtccccgacccacaacctctcggagaacctccagcaacccccgctgctgtgggacctactacaatggcttcaggcggtggcgcaccaatggcagacaataacgaaggcgccgacggagtgggtaatgcctcaggaaattggcattgcgattcccaatggctgggcgacagagtcatcaccaccagcaccagaacctgggccttgcccacctataacaaccacctctacaagcaaatctccagtgcttcaacgggggccagcaacgacaaccactacttcggctacagcaccccctgggggtattttgatttcaacagattccactgccacttctcaccacgtgactggcagcgactcatcaacaacaactggggattccggcctaagcgactcaacttcaagctcttcaacattcaggtcaaagaggttacggacaacaatggagtcaagaccatcgccaataaccttaccagcacggttcaagtcttctcggactcggagtaccagttgccgtacgtcctcggctctgcgcaccagggctgcctccctccgttcccggcggacgtgttcatgattccccagtacggctacctaacactcaacaacggtagtcaggccgtgggacgctcctccttctactgcctggaatactttccttcgcagatgctgagaaccggcaacaacttccagtttacttacaccttcgaggacgtgcctttccacagcagctacgcgcacagccagagcttggaccggctgatgaatcctctgattgaccagtacctgtactacttgtctcggactcaaacaacaggaggcacggcaaatacgcagactctgggcttcagccaaggtgggcctaatacaatggccaatcaggcaaagaactggctgccaggaccctgttaccgccaacaacgcgtctcaacgacaaccgggcaaaacaacaatagcaactttgcctggactgctgggaccaaataccatctgaatggaagaaattcattggctaatcctggcatcgctatggcaacacacaaagacgacaaggagcgtttttttcccagtaacgggatcctgatttttggcaaacaaaatgctgccagagacaatgcggattacagcgatgtcatgctcaccagcgaggaagaaatcaaaaccactaaccctgtggctacagaggaatacggtatcgtggcagataacttgcagcagcaaaacacggctcctcaaattggaactgtcaacagccagggggccttacccggtatggtctggcagaaccgggacgtgtacctgcagggtcccatctgggccaagattcctcacacggacggcaacttccacccgtctccgctgatgggcggctttggcctgaaacatcctccgcctcagatcctgatcaagaacacgcctgtacctgcggatcctccgaccaccttcaaccagtcaaagctgaactctttcatcacgcaatacagcaccggacaggtcagcgtggaaattgaatgggagctgcagaaggaaaacagcaagcgctggaaccccgagatccagtacacctccaactactacaaatctacaagtgtggactttgctgttaatacagaaggcgtgtactctgaaccccaccccattggcacccgttacctcacccgtcccctgtaa

SEQ ID NO: 1000 - DNA, 2244 bp, Artificial Sequence
  source: /note="Description of Artificial Sequence: Synthetic polynucleotide"
  modified_base (2241)..(2241): a, c, g, or t
atggctgccgatggttatcttccagattggctcgaggacactctctctgaaggaataagacagtggtggaagctcaaacctggcccaccaccaccaaagcccgcagagcggcataaggacgacagcaggggtcttgtgcttcctgggtacaagtacctcggacccttcaacggactcgacaagggagagccggtcaacgaggcagacgccgcggccctcgagcacgacaaagcctacgaccggcagctcgacagcggagacaacccgtacctcaagtacaaccacgccgacgcggagtttcaggagcgccttaaagaagatacgtcttttgggggcaacctcgggcgagcagtcttccaggccaagaagagggttctcgaaccttttggtctggttgaggaaggtgctaagacggctcctggaaagaaacgtccggtagagcagtcgccacaagagccagactcctcctcgggcattggcaagacaggccagcagcccgctaaaaagagactcaattttggtcagactggcgactcagagtcagtccccgacccacaacctctcggagaacctccagcaacccccgctgctgtgggacctactacaatggcttcaggcggtggcgcaccaatggcagacaataacgaaggcgccgacggagtgggtaatgcctcaggaaattggcattgcgattccacatggctgggcgacagagtcatcaccaccagcacccgaacatgggccttgcccacctataacaaccacctctacaagcaaatctccagtgcttcaacgggggccagcaacgacaaccactacttcggctacagcaccccctgggggtattttgacttcaacagattccactgccacttctcaccacgtgactggcagcgactcatcaacaacaactggggattccggcctaagcgactcaacttcaagctcttcaacattcaggtcaaagaggttacggacaacaatggagtcaagaccatcgccaataaccttaccagcacggtccaggtcttcacggactcagactatcagctcccgtacgtgctcgggtcggctcacgagggctgcctcccgccgttcccagcggacgttttcatgattcctcagtacggctacctaacactcaacaacggtagtcaggccgtgggacgctcctccttctactgcctggaatactttccttcgcagatgctgagaaccggcaacaacttccagtttacttacaccttcgaggacgtgcctttccacagcagctacgcgcacagccagagcttggaccggctgatgaatcctctgattgaccagtacctgtactacttgtctcggactcaaacaacaggaggcacggcaaatacgcagactctgggcttcagccaaggtgggcctaatacaatggccaatcaggcaaagaactggctgccaggaccctgttaccgccaacaacgcgtctcaacgacaaccgggcaaaacaacaatagcaactttgcctggactgctgggaccaaataccatctgaatggaagaaattcattggctaatcctggcatcgctatggcaacacacaaagacgacaaggagcgtttttttcccagtaacgggatcctgatttttggcaaacaaaatgctgccagagacaatgcggattacagcgatgtcatgctcaccagcgaggaagaaatcaaaaccactaaccctgtggctacagaggaatacggtatcgtggcagataacttgcagcagcaaaacacggctcctcaaattggaactgtcaacagccagggggccttacccggtatggtctggcagaaccgggacgtgtacctgcagggtcccatctgggccaagattcctcacacggacggcaacttccacccgtctccgctgatgggcggctttggcctgaaacatcctccgcctcagatcctgatcaagaacacgcctgtacctgcggatcctccgaccaccttcaaccagtcaaagctgaactctttcatcacgcaatacagcaccggacaggtcagcgtggaaattgaatgggagctgcagaaggaaaacagcaagcgctggaaccccgagatccagtacacctccaactactacaaatctacaagtgtggactttgctgttaatacagaaggcgtgtactctgaaccccaccccattggcaccagatacctgactcgtaatctgtaattgcttgttaatcaataaaccgtttaattnttt

SEQ ID NO: 1001 - DNA, 2217 bp, Artificial Sequence
  source: /note="Description of Artificial Sequence: Synthetic polynucleotide"
atggctgccgatggttatcttccagattggctcgaggacaacctctctgagggcattcgcgagtggtgggacttgaaacctggagccccgaaacccaaagccaaccagcaaaagcaggacgacggccggggtctggtgcttcctggctacaagtacctcggacccttcaacggactcgacaagggggagcccgtcaacgcggcggacgcagcggccctcgagcacgacaaggcctacgaccagcagctccaagcgggtgacaatccgtacctgcggtataaccacgccgacgccgagtttcaggagcgtctgcaagaagatacgtcttttgggggcaacctcggacgagcagtcttccaggcgaaaaagagggttctcgaacctctcggtctggttgaggaaggcgctaagacggctcctggaaagaagagaccggtagagccatcaccccagcgttctccagactcctctacgggcatcggcaagaaaggccaacagcccgccagaaaaagactcaattttggtcagactggcgactcagagtcagttccagaccctcaacctctcggagaacctccagcagcgccctctggtgtgggacctaatacaatggctgcaggcggtggcgcaccaatggcagacaataacgaaggcgccgacggagtgggtagttcctcgggaaattggcattgcgattcccaatggctgggggacagagtcatcaccaccagcacccgaacctgggccctgcccacctacaacaatcacctctacaagcaaatctccaacagcacatctggaggatcttcaaatgacaacgcctacttcggctacagcaccccctgggggtattttgacttcaaccgcttccactgccacttctcaccacgtgactggcagcgactcatcaacaacaactggggattccggcccaagagactcagcttcaaactcttcaacatccaggtcaaggaggtcacgcagaatgaaggcaccaagaccatcgccaataacctcaccagcaccatccaggtgtttacggactcggagtaccagctgccgtacgttctcggctctgcccaccagggctgcctgcctccgttcccggcggacgtgttcatgattcctcagtacggctacctaacgctcaacaatggcagccaggcagtgggacggtcatccttttactgcctggaatatttcccatcgcagatgctgagaacgggcaacaactttaccttcagctacacctttgaggacgttcctttccacagcagctacgctcacagccagagtctggaccgtctcatgaatcctctgattgaccagtacctgtactacttgtctcggactcaaacaacaggaggcacggcaaatacgcagactctgggcttcagccaaggtgggcctaatacaatggccaatcaggcaaagaactggctgccaggaccctgttaccgccaacaacgcgtctcaacgacaaccgggcaaaacaacaatagcaactttgcctggactgctgggaccaaataccatctgaatggaagaaattcattggctaatcctggcatcgctatggcaacacacaaagacgacaaggagcgtttttttcccagtaacgggatcctgatttttggcaaacaaaatgctgccagagacaatgcggattacagcgatgtcatgctcaccagcgaggaagaaatcaaaaccactaaccctgtggctacagaggaatacggtatcgtggcagataacttgcagcagcaaaacacggctcctcaaattggaactgtcaacagccagggggccttacccggtatggtctggcagaaccgggacgtgtacctgcagggtcccatctgggccaagattcctcacacggacggcaacttccacccgtctccgctgatgggcggctttggacttaagcacccgcctcctcagatcctcatcaaaaacacgcctgttcctgcggatcctccgaccaccttcaaccagtcaaagctgaactctttcatcacgcaatacagcaccggacaggtcagcgtggaaattgaatgggagctgcagaaggaaaacagcaagcgctggaaccccgagatccagtacacctccaactactacaaatctacaagtgtggactttgctgttaatacagaaggcgtgtactctgaaccccaccccattggcacccgttacctcacccgtcccctgtaa

SEQ ID NO: 1002 - DNA, 2214 bp, Artificial Sequence
  source: /note="Description of Artificial Sequence: Synthetic polynucleotide"
atggctgccgatggttatcttccagattggctcgaggacaacctctctgagggcattcgcgagtggtgggacttgaaacctggagccccgaagcccaaagccaaccagcaaaagcaggacgacggccggggtctggtgcttcctggctacaagtacctcggacccttcaacggactcgacaagggggagcccgtcaacgcggcggatgcagcggccctcgagcacgacaaagcctacgaccagcagctcaaagcgggtgacaatccgtacctgcggtataaccacgccgacgccgagtttcaggagcgtctgcaagaagatacgtcttttgggggcaacctcgggcgagcagtcttccaggccaagaagagggttctcgaaccttttggtctggttgaggaaggtgctaagacggctcctggaaagaaacgtccggtagagcagtcgccacaagagccagactcctcctcgggcattggcaagacaggccagcagcccgctaaaaagagactcaattttggtcagactggcgactcagagtcagtccccgacccacaacctctcggagaacctccagcaacccccgctgctgtgggacctactacaatggcttcaggcggtggcgcacccatgcaagacaataacgaaggcgccgacggagtgggtagttcctcgggaaattggcattgcgattccacatggctgggcgacagagtcatcaccaccagcacccgaacctgggccctgcccacctacaacaaccacctctacaagcaaatctccaacgggacatcgggaggagccaccaacgacaacacctacttcggctacagcaccccctgggggtattttgactttaacagattccactgccacttttcaccacgtgactggcagcgactcatcaacaacaactggggattccggcccaagagactcaacttcaagctcttcaacatccaggtcaaggaggtcacgcagaatgaaggcaccaagaccatcgccaataaccttaccagcacgattcaggtctttacggattcggaataccagctcccgtacgtcctcggctctgcgcaccagggctgcctccctccgttcccggcggacgtgttcatgattccgcagtacggctacctaacgctcaacaatggtagccaggcagtgggacggtcatccttttactgcctggaatatttcccatcgcagatgctgagaacgggcaacaactttaccttcagctacacctttgaggacgttcctttccacagcagctacgctcacagccagagtctggaccgtctcatgaatcctctgattgaccagtacctgtactacttgtctcggactcaaacaacaggaggcacggcaaatacgcagactctgggcttcagccaaggtgggcctaatacaatggccaatcaggcaaagaactggctgccaggaccctgttaccgccaacaacgcgtctcaacgacaaccgggcaaaacaacaatagcaactttgcctggactgctgggaccaaataccatctgaatggaagaaattcattggctaatcctggcatcgctatggcaacacacaaagacgacaaggagcgtttttttcccagtaacgggatcctgatttttggcaaacaaaatgctgccagagacaatgcggattacagcgatgtcatgctcaccagcgaggaagaaatcaaaaccactaaccctgtggctacagaggaatacggtatcgtggcagataacttgcagcagcaaaacacggctcctcaaattggaactgtcaacagccagggggccttacccggtatggtctggcagaaccgggacgtgtacctgcagggtcccatctgggccaagattcctcacacggacggcaacttccacccgtctccgctgatgggcggctttggcctgaaacatcctccgcctcagatcctgatcaagaacacgcctgtacctgcggatcctccgaccaccttcaaccagtcaaagctgaactctttcatcacgcaatacagcaccggacaggtcagcgtggaaattgaatgggagctgcagaaggaaaacagcaagcgctggaaccccgagatccagtacacctccaactactacaaatctacaagtgtggactttgctgttaatacagaaggcgtgtactctgaaccccaccccattggcacccgttacctcacccgtcccctgtaa

SEQ ID NO: 1003 - DNA, 2211 bp, Artificial Sequence
  source: /note="Description of Artificial Sequence: Synthetic polynucleotide"
atggctgccgatggttatcttccagattggctcgaggacaacctctctgagggcattcgcgagtggtgggcgctgaaacctggagccccgaagcccaaagccaaccagcaaaagcaggacgacggccggggtctggtgcttcctggctacaagtacctcggacccttcaacggactcgacaagggggagcccgtcaacgcggcggacgcagcggccctcgagcacgacaaggcctacgaccagcagctcaaagcgggtgacaatccgtacctgcggtataaccacgccgacgccgagtttcaggagcgtctgcaagaagatacgtcttttgggggcaacctcgggcgagcagtcttccaggccaagaagcgggttctcgaacctctcggtctggttgaggaaggcgctaagacggctcctggaaagaaacgtccggtagagcagtcgccacaagagccagactcctcctcgggcatcggcaagacaggccagcagcccgctaaaaagagactcaattttggtcagactggcgactcagagtcagtccccgacccacaacctctcggagaacctccagcaacccccgctgctgtgggacctactacaatggcttcaggcggtggcgcaccaatggcagacaataacgaaggcgccgacggagtgggtagttcctcgggaaattggcattgcgattccacatggctgggcgacagagtcatcaccaccagcacccgcacctgggccttgcccacctacaataaccacctctacaagcaaatctccagtgcttcaacgggggccagcaacgacaaccactacttcggctacagcaccccctgggggtattttgacttcaacagattccactgccacttctcaccacgtgactggcagcgactcatcaacaacaactggggattccggcctaagcgactcaacttcaagctcttcaacattcaggtcaaagaggttacggacaacaatggagtcaagaccatcgccaataaccttaccagcacggtccaggtcttcacggactcagactatcagctcccgtacgtgctcgggtcggctcacgagggctgcctcccgccgttcccagcggacgttttcatgattcctcagtacgggtatctgacgctcaacaatggcagccaggcagtgggacggtcatccttttactgcctggaatatttcccatcgcagatgctgagaacgggcaataactttaccttcagctacaccttcgaggacgtgcctttccacagcagctacgcgcacagccagagcctggaccggctgatgaatcctctgattgaccagtacctgtactacttgtctcggactcaaacaacaggaggcacggcaaatacgcagactctgggcttcagccaaggtgggcctaatacaatggccaatcaggcaaagaactggctgccaggaccctgttaccgccaacaacgcgtctcaacgacaaccgggcaaaacaacaatagcaactttgcctggactgctgggaccaaataccatctgaatggaagaaattcattggctaatcctggcatcgctatggcaacacacaaagacgacaaggagcgtttttttcccagtaacgggatcctgatttttggcaaacaaaatgctgccagagacaatgcggattacagcgatgtcatgctcaccagcgaggaagaaatcaaaaccactaaccctgtggctacagaggaatacggtatcgtggcagataacttgcagcagcaaaacacggctcctcaaattggaactgtcaacagccagggggccttacccggtatggtctggcagaaccgggacgtgtacctgcagggtcccatctgggccaagattcctcacacggacggcaacttccacccgtctccgctgatgggcggctttggcctgaaacatcctccgcctcagatcctgatcaagaacacgcctgtacctgcggatcctccgaccaccttcaaccagtcaaagctgaactctttcatcacgcaatacagcaccggacaggtcagcgtggaaattgaatgggagctgcagaaggaaaacagcaagcgctggaaccccgagatccagtacacctccaactactacaaatctacaagtgtggactttgctgttaatacagaaggcgtgtactctgaaccccaccccattggcacccgttacctcacccgtcccctgtaa

SEQ ID NO: 1004 - DNA, 2214 bp, Artificial Sequence
  source: /note="Description of Artificial Sequence: Synthetic polynucleotide"
atggctgccgatggttatcttccagattggctcgaggacaacctctctgagggcattcgcgagtggtgggacttgaaacctggagccccgaaacccaaagccaaccagcaaaagcaggacgacggccggggtctggtgcttcctggctacaagtacctcggacccttcaacggactcgacaagggggagcccgtcaacgcggcggatgcagcggccctcgagcacgacaaggcctacgaccagcagctcaaagcgggtgacaatccgtacctgcggtataaccacgccgacgccgagtttcaggagcgtctgcaagaagatacgtcttttgggggcaacctcgggcgagcagtcttccaggccaagaagcgggttctcgaacctctcggtctggttgaggaaggcgctaagacggctcctggaaagaagagaccggtagagccatcaccccagcgttctccagactcctctacgggcatcggcaagaaaggccaacagcccgccagaaaaagactcaattttggtcagactggcgactcagagtcagtccccgacccacaacctctcggagaacctccagcaacccccgctgctgtgggacctactacaatggcttcaggcggtggcgcaccaatggcagacaataacgaaggcgccgacggagtgggtaatgcctcaggaaattggcattgcgattccacatggctgggcgacagagtcatcaccaccagcacccgaacatgggccttgcccacctataacaaccacctctacaagcaaatctccagtgcttcaacgggggccagcaacgacaaccactacttcggctacagcaccccctgggggtattttgatttcaacagattccactgccatttctcaccacgtgactggcagcgactcatcaacaacaatttgggatcccggcccaagagactcaacttcaagctcttcatcatccaagtcaaggaggtcacgacgaatgatggcgtcacgaccatcgctaataaccttaccagcacggttcaagtcttctcggactcggagtaccagttgccgtacgtcctcggctctgcgcaccagggctgcctccctccgttcccggcggacgtgttcatgattccgcagtacggctacctaacgctcaacaatggcagccaggcagtgggacggtcatccttttactgcctggaatatttcccatcgcagatgctgagaacgggcaataactttaccttcagctacaccttcgaggacgtgcctttccacagcagctacgcgcacagccagagcctggaccggctgatgaatcctctcatcgaccagtacctgtattacctgaacagaactcagaatcagtccggaagtgcccaaaacaaggacttgctgtttagccgggggtctccagctggcatgtctgttcagcccaaaaactggctacctggaccctgttaccggcagcagcgcgtttctaaaacaaaaacagacaacaacaacagcaactttacctggactggtgcttcaaaatataaccttaatgggcgtgaatctataatcaaccctggcactgctatggcctcacacaaagacgacaaagacaagttctttcccatgagcggtgtcatgatttttggaaaggagagcgccggagcttcaaacactgcattggacaatgtcatgatcacagacgaagaggaaatcaaagccactaaccccgtggccaccgaaagatttgggactgtggcagtcaatctccagagcagcagcacagaccctgcgaccggagatgtgcatgttatgggagccttacctggaatggtgtggcaagacagagacgtatacctgcagggtcctatttgggccaaaattcctcacacggatggacactttcacccgtctcctctcatgggcggctttggacttaagcacccgcctcctcagatcctcatcaaaaacacgcctgttcctgcgaatcctccggcagagttttcggctacaaagtttgcttcattcatcacccagtattccacaggacaagtgagcgtggagattgaatgggagctgcagaaagaaaacagcaaacgctggaatcccgaagtgcagtatacatctaactatgcaaaatctgccaacgttgatttcactgtggacaacaatggactttatactgagcctcgccccattggcacccgttacctcacccgtcccctgtaa

SEQ ID NO: 1005 - DNA, 2211 bp, Artificial Sequence
  source: /note="Description of Artificial Sequence: Synthetic polynucleotide"
atggctgccgatggttatcttccagattggctcgaggacaacctctctgagggcattcgcgagtggtgggcgctgaaacctggagccccgaaacccaaagccaaccagcaaaagcaggacgacggccggggtctggtgcttcctggctacaagtacctcggacccttcaacggactcgacaagggggagcccgtcaacgcggcggacgcagcggccctcgagcacgacaaggcctacgaccagcagctcaaggcgggtgacaatccgtacctgcggtataaccacgccgacgccgagtttcaggagcgtctgcaagaagatacgtcttttgggggcaacctcgggcgagcagtcttccaggccaaaaagaggcttcttgaacctcttggtctggttgaggaagcggctaagacggctcctggaaagaaacgtccggtagagcagtcgccacaagagccagactcctcctcgggcattggcaagacaggccagcagcccgctaaaaagagactcaactttgggcagactggcgactcagagtcagtgcccgaccctcaaccaatcggagaacctccagcaacccccgctgctgtgggacctactacaatggcttcaggcggtggcgcaccaatggcggacaataacgaaggcgccgatggagtgggtaattcctcgggaaattggcattgcgattccacatggctgggcgacagagtcatcaccaccagcacccgaacctgggccctgcccacctacaacaatcacctctacaagcaaatctccagtgcttcaacgggggccagcaacgacaaccactacttcggctacagcaccccctgggggtattttgatttcaacagattccactgccacttttcaccacgtgactggcagcgactcatcaacaacaactggggattccggcccaagagactcaacttcaagctcttcaacatccaggtcaaggaggtcacgcagaatgaaggcaccaagaccatcgccaataacctcaccagcaccatccaggtgtttacggactcggagtaccagctgccgtacgttctcggctccgcccaccagggctgcctgcctccgttcccggcggacgtgttcatgattccgcagtacggctacctaacgctcaacaatggcagccaggcagtgggacggtcatccttttactgcctggaatatttcccatcgcagatgctgagaacgggcaacaactttaccttcagctacacctttgaggacgttcctttccacagcagctacgctcacagccagagtctggaccgtctcatgaatcctctgattgaccagtacctgtactacttgtctcggactcaaacaacaggaggcacggcaaatacgcagactctgggcttcagccaaggtgggcctaatacaatggccaatcaggcaaagaactggctgccaggaccctgttaccgccaacaacgcgtctcaacgacaaccgggcaaaacaacaatagcaactttgcctggactgctgggaccaaataccatctgaatggaagaaattcattggctaatcctggcatcgctatggcaacacacaaagacgacaaggagcgtttttttcccagtaacgggatcctgatttttggcaaacaaaatgctgccagagacaatgcggattacagcgatgtcatgctcaccagcgaggaagaaatcaaaaccactaaccctgtggctacagaggaatacggtatcgtggcagataacttgcagcagcaaaacacggctcctcaaattggaactgtcaacagccagggggccttacccggtatggtctggcagaaccgggacgtgtacctgcagggtcccatctgggccaagattcctcacacggacggcaacttccacccgtctccgctgatgggcggctttggcctgaaacatcctccgcctcagatcctgatcaagaacacgcctgtacctgcggatcctccgaccaccttcaaccagtcaaagctgaactctttcatcacgcaatacagcaccggacaggtcagcgtggaaattgaatgggagctgcagaaggaaaacagcaagcgctggaaccccgagatccagtacacctccaactactacaaatctacaagtgtggactttgctgttaatacagaaggcgtgtactctgatccccaccccattggcacccgttacctcacccgtcccctgtaa

SEQ ID NO: 1006 - DNA, 2211 bp, Artificial Sequence
  source: /note="Description of Artificial Sequence: Synthetic polynucleotide"
atggctgccgatggttatcttccagattggctcgaggacaacctctctgagggcattcgcgagtggtgggcgctgaaacctggagccccgaagcccaaagccaaccagcaagagcaggacgacggccggggtctggtgcttcctggctacaagtacctcggacccttcaacggactcgacaagggagagcccgtcaacgcggcggatgcagcggccctcgagcacgacaaagcctacgaccagcagctcaaagcgggtgacaatccgtacctgcggtataaccacgccgacgccgagtttcaggagcgtctgcaagaagatacgtcttttgggggcaacctcgggcgagcagtcttccaggccaagaagagggttctcgaaccttttggtctggttgaggaaggtgctaagacggctcctggaaagaaacgtccggtagagcagtcgccacaagagccagactcctcctcgggcattggcaagacaggccagcagcccgctaaaaagagactcaattttggtcagactggcgactcagagtcagttccagaccctcaacctctcggagaacctccagcagcgccctctggtgtgggacctaatacaatggctgcaggcggtggcgcaccaatggcagacaataacgaaggcgccgacggagtgggtagttcctcgggaaattggcattgcgattccacatggctgggcgacagagtcatcaccaccagcacccgaacctgggccctgcccacctacaacaaccacctctacaagcaaatctccagtgcttcaacgggggccagcaacgacaaccactacttcggctacagcaccccctgggggtattttgactttaacagattccactgccacttttcaccacgtgactggcagcgactcatcaacaacaactggggattccggcccaagagactcaacttcaagctcttcaacatccaggtcaaggaggtcacgcagaatgaaggcaccaagaccatcgccaataaccttaccagcacgattcaggtctttacggattcggaataccagctcccgtacgtcctcggctctgcgcaccagggctgcctccctccgttcccggcggacgtgttcatgattccgcagtacggctacctaacgctcaacaatggtagccaggcagtgggacggtcatcctttttctgcctggaatatttcccatcgcagatgctgagaacgggcaacaactttaccttcagctacacctttgaggacgttcctttccacagcagctacgctcacagccagagtctggaccgtctcatgaatcctctgattgaccagtacctgtactacttgtctcggactcaaacaacaggaggcacggcaaatacgcagactctgggcttcagccaaggtgggcctaatacaatggccaatcaggcaaagaactggctgccaggaccctgttaccgccaacaacgcgtctcaacgacaaccgggcaaaacaacaatagcaactttgcctggactgctgggaccaaataccatctgaatggaagaaattcattggctaatcctggcatcgctatggcaacacacaaagacgacaaggagcgtttttttcccagtaacgggatcctgatttttggcaaacaaaatgctgccagagacaatgcggattacagcgatgtcatgctcaccagcgaggaagaaatcaaaaccactaaccctgtggctacagaggaatacggtatcgtggcagataacttgcagcagcaaaacacggctcctcaaattggaactgtcaacagccagggggccttacccggtatggtctggcagaaccgagacgtgtacctgcagggtcccatctgggccaagattcctcacacggacggcaacttccacccgtctccgctgatgggcggctttggcctgaaacatcctccgcctcagatcctgatcaagaacacgcctgtacctgcggatcctccgaccaccttcaaccagtcaaagctgaactctttcatcacgcaatacagcaccggacaggtcagcgtggaaattgaatgggagctgcagaaggaaaacagcaagcgctggaaccccgagatccagtacacctccaactactacaaatctacaagtgtggactttgctgttaatacagaaggcgtgtactctgaaccccaccccattggcacccgttacctcacccgtcccctgtaa

SEQ ID NO: 1007 - DNA, 2211 bp, Artificial Sequence
  source: /note="Description of Artificial Sequence: Synthetic polynucleotide"
atggctgccgatggttatcttccagattggctcgaggacaacctctctgagggcattcgcgagtggtgggacttgaaacctggagccccgaagcccaaagccaaccagcaaaagcaggacgacggccggggtctggtgcttcctggctacaagtacctcggacccttcaacggactcgacaagggggagcccgtcaacgcggcggacgcagcggccctcgagcacgacaaggcctacgaccagcagctcaaagcgggtgacaatccgtacctgcggtataaccacgccgacgccgagtttcaggagcgtctgcaagaagatacgtcttttgggggcaacctcgggcgagcagtcttccaggccaagaagcgggttctcgaacctctcggtctggttgaggaaggcgctaagacggctcctggaaagaaacgtccggtagagcagtcaccacaagagccagactcctcctcgggcatcggcaagacaggccagcagcccgctaaaaagagactcaattttggtcagactggcgactcagagtcagtccccgacccacaacctctcggagaacctccagcaacccccgctgctgtgggacctactacaatggcttcaggcggtggcgcaccaatggcggacaataacgaaggcgccgacggagtgggtaatgcctcaggaaattggcattgcgattccacatggctgggcgacagagtcatcaccaccagcacccgaacatgggccttgcccacctataacaaccacctctacaagcaaatctccagtgcttcaacgggggccagcaacgacaaccactacttcggctacagcaccccctgggggtattttgatttcaacagattccactgccatttctcaccacgtgactggcagcgactcatcaacaacaattggggattccggcccaagagactcaacttcaagctcttcaacatccaagtcaaggaggtcacgacgaatgatggcgtcacgaccatcgctaataaccttaccagcacggttcaagtcttctcggactcggagtaccagttgccgtacgtcctcggctctgcgcaccagggctgcctccctccgttcccggcggacgtgttcatgattccgcagtacggctacctaacgctcaacaatggcagccaggcagtgggacggtcatccttttactgcctggaatatttcccatcgcagatgctgagaacgggcaataactttaccttcagctacaccttcgaggacgtgcctttccacagcagctacgcgcacagccagagcctggaccggctgatgaatcctctcatcgaccagtacctgtattacctgaacagaactcagaatcagtccggaagtgcccaaaacaaggacttgctgtttagccgggggtctccagctggcatgtctgttcagcccaaaaactggctacctggaccctgttaccggcagcagcgcgtttctaaaacaaaaacagacaacaacaacagcaactttacctggacaggtgcttcaaaatataaccttaatgggcgtgaatctataatcaaccctggcactgctatggcctcacacaaagacgacaaagacaagttctttcccatgagcggtgtcatgatttttggaaaggagagcgccggagcttcaaacactgcattggacaatgtcatgatcacagacgaagaggaaatcaaagccactaaccccgtggccaccgaaagatttgggactgtggcagtcaatctccagaacagcagcacagaccctgcgaccggagatgtgcatgttatgggagccttacctggaatggtgtggcaagacagagacgtatacctgcagggtcctatttgggccaaaattcctcacacggatggacactttcacccgtctcctctcatgggcggctttggacttaagcacccgcctcctcagatcctcatcaaaaacacgcctgttcctgcgaatcctccggcagagttttcggctacaaagtttgcttcattcatcacccagtattccacaggacaagtgagcgtggagattgaatgggagctgcagaaagaaaacagcaaacgctggaatcccgaagtgcagtatacatctaactatgcaaaatctgccaacgttgatttcactgtagacaacaatggactttatactgtgcctcgccccattggcacccgttacctcacccgtcccctgtaa

SEQ ID NO: 1008 - DNA, 2211 bp, Artificial Sequence
  source: /note="Description of Artificial Sequence: Synthetic polynucleotide"
atggctgccgatggttatcttccagattggctcgaggacaacctctctgagggcattcgcgagtggtgggcgctgaaacctggagccccgaagcccaaagccaaccagcaaaagcaggacgacggccggggtctggtgcttcctggctacaagtacctcggacccttcaacggactcgacaaaggagagccggtcaacgcggcggacgcggcggccctcgaacacgacaaggcttacgaccagcagctcaaggcgggtgacaacccctacctgcggtataaccacgccgacgccgagttccaggagcggctgcaagaagatacgtcttttgggggcaacctcgggcgagcagtcttccaggccaaaaagaggcttcttgaacctcttggtctggttgaggaaggcgctaagacggctcctggaaagaagaggcctgtagagcagtctcctcaagaaccggactcctcctcgggtattggcaaaacaggtgagcagcccgctaaaaagagactcaattttggtcagactggcgactcagagtcagtccccgacccacaacctctcggagaacctccagcaacccccgctgctgtgggacctactacaatggcttcaggcggtggcgcaccaatggcagacaataacgaaggcgccgacggagtgggtagtgcctcaggaaattggcattgcgattccacatggctgggcgacagagtcatcaccaccagcacccgaacctgggccctgcccacctataacaaccatctctacaagcaaatctccagtgcttcaacgggggccagcaacgacaaccactacttcggctacagcaccccctgggggtattttgacttcaacagattccactgccacttctcaccacgtgactggcagcgactcatcaacaacaactggggattccggcctaagcgactcaacttcaagctcttcaacattcaggtcaaagaggttacggacaacaatggagtcaagaccatcgccaataacctcaccagcaccatccaggtgttcacggactcagagtatcagctgccgtacgtgctcgggtcggctcaccagggctgcctccctccgttcccagcggacgtgttcatgattcctcagtacgggtatctgacactcaacaacggcagtcaggcagtgggacggtcatccttctactgcctggaatattttccatcgcagatgctgagaaccggcaacaactttccgttcagttacaccttcgaggacgtgcctttccacagcagctacgcgcacagccagagcctggaccggctgatgaatcctctgattgaccagtacctgtactacttgtctcggactcaaacaacaggaggcacggcaaatacgcagactctgggcttcagccaaggtgggcctaatacaatggccaatcaggcaaagaactggctgccaggaccctgttaccgccaacaacgcgtctcaacgacaaccgggcaaaacaacaatagcaactttgcctggactgctgggaccaaataccatctgaatggaagaaattcattggctaatcctggcatcgctatggcaacacacaaagacgacaaggagcgtttttttcccagtaacgggatcctgatttttggcaaacaaaatgctgccagagacaatgcggattacagcgatgtcatgctcaccagcgaggaagaaatcaaaaccactaaccctgtggctacagaggaatacggtatcgtggcagataacttgcagcagcaaaacacggctcctcaaattggaactgtcaacagccagggggccttacccggtatggtctggcagaaccgggacgtgtacctgcagggtcccatctgggccaagattcctcacacggacggcaacttccacccgtctccgctgatgggcggctttggcctgaaacatcctccgcctcagatcctgatcaagaacacgcctgtacctgcggatcctccgaccaccttcaaccagtcaaagctgaactctttcatcacgcaatacagcaccggacaggtcagcgtggaaattgaatgggagctgcagaaggaaaacagcaagcgctggaaccccgagatccagtacacctccaactactacaaatctacaagtgtggactttgctgttaatacagaaggcgtgtactctgaaccccaccccattggcacccgttacctcacccgtcccctgtaa

SEQ ID NO: 1009 - DNA, 2211 bp, Artificial Sequence
  source: /note="Description of Artificial Sequence: Synthetic polynucleotide"
atggctgccgatggttatcttccagattggctcgaggacaacctctctgagggcattcgcgagtggtgggcgctgaaacctggagccccgaagcccaaagccaaccagcaaaagcaggacgacggccggggtctggtgcttcctggctacaagtacctcggacccttcaacggactcgacaagggggagcccgtcaacgcggcggacgcagcggccctcgagcacgacaaggcctacgaccagcagctcaaagcgggtgacaatccgtacctgcggtataaccacgccgacgccgagtttcaggagcgtctgcaagaagatacgtcttttgggggcaacctcgggcgagcagtcttccaggccaagaagcgggttctcgaacctctcggtctggttgaggaaggcgctaagacggctcctggaaagaaacgtccggtagaacagtcgccacaagagccagactcctcctcgggcatcggcaagacaggccagcagcccgctaaaaagagactcaattttggtcagactggcgactcagagtcagtccccgatccacaacctctcggagaacctccagcaacccccgctgctgtgggacctactacaatggcttcaggcggtggcgcaccaatggcagacaataacgaaggcgccgacggagtgggtagttcctcgggaaattggcattgcgattcccaatggctgggggacagagtcatcaccaccagcacccgaacctgggccctgcccacctacaacaaccacctctacaagcaaatctccagtgcttcaacgggggccagcaacgacaaccactacttcggctacagcaccccctgggggtattttgatttcaacagattccactgccatttctcaccacgtgactggcagcgactcatcaacaacaactggggattccggcctaagcgactcaacttcaagctcttcaacattcaggtcaaagaggttacggacaacaatggagtcaagaccatcgccaataaccttaccagcacggtccaggtcttcacggactcggagtaccagttgccgtacgtcctcggctctgcgcaccaggactgcctccctccgttcccggcggacgtgttcatgattccgcagtacggctacctaacgctcaacaatggcagccaggcagtgggacggtcatccttttactgcctggaatatttcccatcgcagatgctgagaacgggcaacaactttaccttcagctacacctttgaggacgttcctttccacagcagctacgctcacagccagagtctggaccgtctcatgaatcctctgattgaccagtacctgtactacttgtctcggactcaaacaacaggaggcacggcaaatacgcagactctgggcttcagccaaggtgggcctaatacaatggccaatcaggcaaagaactggctgccaggaccctgttaccgccaacaacgcgtctcaacgacaaccggacaaaacaacaatagcaactttgcctggactgctgggaccaaataccatctgaatggaagaaattcattggctaatcctggcatcgctatggcaacacacaaagacgacaaggagcgtttttttcccagtaacgggatcctgatttttggcaaacaaaatgctgccagagacaatgcggattacagcgatgtcatgctcaccagcgaggaagaaatcaaaaccactaaccctgtggctacagaggaatacggtatcgtggcagataacttgcagcagcaaaacacggctcctcaaattggaactgtcaacagccagggggccttacccggtatggtctggcagaaccgggacgtgtacctgcagggtcccatctgggccaagattcctcacacggacggcaacttccacccgtctccgctgatgggcggctttggcctgaaacatcctccgcctcagatcctgatcaagaacacgcctgtacctgcggatcctccgaccaccttcaaccagtcaaagctgaactctttcatcacgcaatacagcaccggacaggtcagcgtggaaattgaatgggagctgcagaaggaaaacagcaagcgctggaaccccgagatccagtacacctccaactactacaaatctacaagtgtggactttgctgttaatacagaaggcgtgtactctgaaccccaccccattggcacccgttacctcacccgtcccctgtaa

SEQ ID NO: 1010 - DNA, 2211 bp, Artificial Sequence
  source: /note="Description of Artificial Sequence: Synthetic polynucleotide"
atggctgccgatggttatcttccagattggctcgaggacaacctctctgagggcattcgcgagtggtgggacttgaaacctggagccccgaagcccaaagccaaccagcaaaagcaggacgacggccggggtctggtgcttcctggctacaagtacctcggacccttcaacggactcgacaagggggagcccgtcaacgcggcggacgcagcggccctcgagcacgacaaggcctacgaccagcagctcaaagcgggtgacaatccgtacctgcggtataaccacgccgacgccgagtttcaggagcgtctgcaagaagatacgtcttttgggggcaacctcgggcgagcagtcttccaggccaagaagcgggttctcgaacctctcggtctggttgaggaaggcgctaagacggctcctggaaagaaacgtccggtagagcagtcaccacaagagccagactcctcctcgggcatcggcaagacaggccagcagcccgctaaaaagagactcaattttggtcagactggcgactcagagtcagtccccgacccacaacctctcggagaacctccagcaacccccgctgctgtgggacctactacaatggcttcaggcggtggcgcaccaatggcagacaataacgaaggtgccgacggagtgggtaatgcctcaggaaattggcattgcgattccacatggctgggcgactgagtcatcaccaccagcacccgcacctgggccttgcccacctacaataaccacctctacaagcaaatctccagtgcttcaacgggggccagcaacgacaaccactacttcggctacagcaccccctgggggtattttgatttcaacagattccactgccacttttcaccacgtgactggcagcgactcatcaacaacaattggggattccggcccaagagactcaacttcaaactcttcaacatccaagtcaaggaggtcacgcagaatgaaggcaccaagaccatcgccaataacctcaccagcaccatccaggtgtttacggactcggagtaccagctgccgtacgttctcggctctgcccaccagggctgcctgcctccgttcccggcggacgtgttcatgattccccagtacggctacctaacgctcaacaatggcagccaggcagtgggacggtcatccttttactgcctggaatactttccttcgcagatgctgagaaccggcaacaacttccagtttacttacaccttcgaggacgtgcctttccacagcagctacgcccacagccagagcttggaccggctgatgaatcctctgattgaccagtacctgtactacttgtctcggactcaaacaacaggaggcacggcaaatacgcagactctgggcttcagccaaggtgggcctaatacaatggccaatcaggcaaagaactggctgccaggaccctgttaccgccaacaacgcgtctcaacgacaaccgggcaaaacaacaatagcaactttgcctggactgctgggaccaaataccatctgaatggaagaaattcattggctaatcctggcatcgctatggcaacacacaaagacgacaaggagcgtttttttcccagtaacgggatcctgatttttggcaaacaaaatgctgccagagacaatgcggattacagcgatgtcatactcaccagcgaggaagaaatcaaaaccactaaccctgtggctacagaggaatacggtatcgtggcagataacttgcagcagcaaaacacggctcctcaaattggaactgtcaacagccagggggccttacccggtatggtctggcagaaccgggacgtgtacctgcagggtcccatctgggccaagattcctcacacggacggcaacttccacccgtctccgctgatgggcggctttggcctgaaacatcctccgcctcagatcctgatcaagaacacgcctgtacctgcggatcctccgaccaccttcaaccagtcaaagctgaactctttcatcacgcaatacagcaccggacaggtcagcgtggaaattgaatgggagctgcagaaggaaaacagcaagcgctggaaccccgagatccagtacacctccaactactacaaatctacaagtgtggactttgctgttaatacagaaggcgtgtactctgaaccccaccccattggcacccgttacctcacccgtcccctgtaa

SEQ ID NO: 1011 - DNA, 2211 bp, Artificial Sequence
  source: /note="Description of Artificial Sequence: Synthetic polynucleotide"
atggctgccgatggttatcttccagattggctcgaggacactctctctgaaggaataagacagtggtggaagctcaaacctggcccaccaccaccaaagcccgcagagcggcataaggacgacagcaggggtcttgtgcttcctgggtacaagtacctcggacccttcaacggactcgacaagggagagccggtcaacgaggcagacgccgcggccctcgagcacgacaaagcctacgaccggcagctcgacagcggagacaacccgtacctcaagtacaaccacgccgacgcggagtttcaggagcgccttaaagaagatacgtcttttgggggcaacctcgggcgagcagtcttccaggccaagaagagggttctcgaaccttttggtctggttgaggaaggtgctaagacggctcctggaaagaaacgtccggtagagcagtcgccacaagagccagactcctcctcgggcattggcaagacaggccagcagcccgctaaaaagagactcaattttggtcagactggcgactcagagtcagtccccgacccacaacctctcggagaacctccagcaacccccgctgctgtgggacctactacaatggcttcaggcggtggcgcaccaatggcagacaataacgaaggcgccgacggagtgggtaatgcctcaggaaattggcattgcgattccacatggctgggcgacagagtcatcaccaccagcacccgaacatgggccttgcccacctataacaaccacctctacaagcaaatctccagtacttcaacgggggccagtaacgacaaccactacttcggctacagcaccccctgggggtattttgacttcaacagattccactgccacttctcaccacgtgactggcagcgactcatcaacaacaactggggattccggcctaagcgactcaacttcaagctcttcaacattcaggtcaaagaggttacggacaacaatggagtcaagaccatcgccaataaccttaccagcacggtccaggtcttcacggactcggagtaccagttgccgtacgtcctcggctctgcgcaccagggctgcctgcctccgttcccggcggacgtgttcatgattccgcagtacggctacctaacgctcaacaatggcagccaggcagtgggacggtcatccttttactgcctggaatatttcccatcgcagatgctgagaacgggcaacaactttaccttcagctacacttttgaggacgttcctttccacagcagctacgctcacagccagagtctggaccgtctcatgaatcctctgattgaccagtacctgtactacttgtctcggactcaaacaacaggaggcacggcaaatacgcagactctgggcttcagccaaggtgggcctaatacaatggccaatcaggcaaagaactggctgccaggaccctgttaccgccaacaacgcgtctcaacgacaaccggacaaaacaacaatagcaactttgcctggactgctgggaccaaataccatctgaatggaagaaattcattggctaatcctggcatcgctatggcaacacacaaagacgacaaggagcgtttttttcccagtaacgggatcctgatttttggcaaacaaaatgctgccagagacaatgcggattacagcgatgtcatgctcaccagcgaggaagaaatcaaaaccactaaccctgtggctacagaggaatacggtatcgtggcagataacttgcagcagcaaaacacggctcctcaaattggaactgtcaacagccagggggccttacccggtatggtctggcagaaccgggacgtgtacctgcagggtcccatctgggccaagattcctcacacggacggcaacttccacccgtctccgctgatgggcggctttggcctgaaacatcctccgcctcagatcctgatcaagaacacgcctgtacctgcggatcctccgaccaccttcaaccagtcaaagctgaactctttcatcacgcaatacagcaccggacaggtcagcgtggaaattgaatgggagctgcagaaggaaaacagcaagcgctggaaccccgagatccagtacacctccaactactacaaatctacaagtgtggactttgctgttaatacagaaggcgtgtactctgaaccccaccccattggcacccgttacctcacccgtcccctgtaa

SEQ ID NO: 1012 - DNA, 2208 bp, Artificial Sequence
  source: /note="Description of Artificial Sequence: Synthetic polynucleotide"
atggctgccgatggttatcttccagattggctcgaggacaacctctctgagggcattcgcgagtggtgggacttgaaacctggagccccgaagcccaaagccaaccagcaaaagcaggacgacggccggggtctggtgcttcctggctacaagtacctcggacccttcaacggactcgacaagggggagcccgtcaacgcggcggatgcagcggccctcgagcacgacaaggcctacgaccggcagctcgacagcggagacaacccgtacctgcggtataaccacgccgacgcggagtttcaggagcgccttaaagaagatacgtcttttgggggcaacctcgggcgagcagtcttccaggccaagaagagggttctcgaaccttttggtctggttgaggaaggtgctaagacggctcctggaaagaaacgtccggtagagcagtcgccacaagagccagactcctcctcgggcattggcaagacaggccagcagcccgctaaaaagagactcaattttggtcagactggcgactcagagtcagtccccgacccacaacctctcggagaacctccagcaacccccgctgctgtgggacctactacaatggcttcaggcggtggcgcaccaatggcagacaataacgaaggcgccgacggagtgggtaatgcctcaggaaattggcattgcgattccacatggctgggcgacagagtcatcaccaccagcacccgcacctgggccttgcccacctacaataaccacctctacaagcaaatctccagtgcttcaacgggggccagcaacgacaaccactacttcggctacagcaccccctgggggtattttgactttaacagattccactgccacttttcaccacgtgactggcaaagactcatcaacaacaactggggattccggcccaagagactcaacttcaagctcttcaacatccaggtcaaggaggtcacgcagaatgaaggcaccaagaccatcgccaataaccttaccagcacgattcaggtctttacggactcggaataccagctcccgtacgtcctcggctctgcgcaccagggctgcctccctccgttcccggcggacgtgttcatgattccgcagtacggctacctaacactcaacaacggtagtcaggccgtgggacgctcctccttctactgcctggaatactttccttcgcagatgctgagaaccggcaacaacttccagtttacttacaccttcgaggacgtgcctttccacagcagctacgcccacagccagagcttggaccggctgatgaatcctctgattgaccagtacctgtactacttgtctcggactcaaacaacaggaggcacggcaaatacgcagactctgggcttcagccaaggtgggcctaatacaatggccaatcaggcaaagaactggctgccaggaccctgttaccgccaacaacgcgtctcaacgacaaccgggcaaaacaacaatagcaactttgcctggactgctgggaccaaataccatctgaatggaagaaattcactggctaatcctggcatcgctatggcaacacacaaagacgacaggagcgtttttttccagtaccgggatcctgattttggcaaacaaaatgctgccagagacaatgcggattacagcgatgtcatgctcaccagcgaggaagaaatcaaaaccactaaccctgtggctacagaggaatacggtatcgtggcagataacttgcagcagcaaaacacggctcctcaaattggaactgtcaacagccagggggccttacccggtatggtctggcagaaccgggacgtgtacctgcagggtcccatctgggccaagattcctcacacggacggcaacttccacccgtctccgctgatgggcggctttggcctgaaacatcctccgcctcagatcctgatcaagaacacgcctgtacctgcggatcctccgaccaccttcaaccagtcaaagctgaactctttcatcacgcaatacagcaccggacaggtcagcgtggaaattgaatgggagctgcagaaggaaaacagcaagcgctggaaccccgagatccagtacacctccaactactacaaatctacaagtgtggactttgctgttaatacagaaggcgtgtactctgaaccccaccccattggcacccgttacctcacccgtcccctgtaa

SEQ ID NO: 1013 - DNA, 2211 bp, Artificial Sequence
  source: /note="Description of Artificial Sequence: Synthetic polynucleotide"
atggctgccgatggttatcttccagattggctcgaggacaacctctctgagggcattcgcgagtggtgggcgctgaaacctggagccccgaagcccaaagccaaccagcaaaagcaggacgacggccggggtctggtgcttcctggctacaagtacctcggacccttcaacggactcgacaagggggagcccgtcaacgcggcggatgcagcagccctcgaacacgacaaagcttacgaccagcagctcaaggccggtgacaacccctacctcaagtataaccacgccgacgccgagtttcaggagcgtcttcaaggagatacgtcttttgggggcaacctcggacgagcagtcttccaggccaagaagcgggttctcgaacctcttggtctggttgaggaagcggctaagacggctcctggaaagaagaggcctgtagagcagtctcctcaggaaccggactcctccgcgggtattggcaaatcgggtgcacagcccgctaaaaagagactcaatttcggtcagactggcgacacagagtcagtcccagaccctcaacctctcggagaacctccagcagcgccctctggtgtgggacctaatacaatggctgcaggcggtggcgcaccaatggcagacaataacgaaggtgccgatggagtgggtagttcctcgggaaattggcattgcgattcccaatggctgggggacagagtcatcaccaccagcacccgaacctgggccctgcccacctacaacaaccacctctacaagcaaatctccagtgcttcaacgggggccagcaacgacaaccactacttcggctacagcaccccttgggggtattttgacttcaacagattccactgccacttttcaccacgtgactggcagcgactcatcaacaacaactggggattccggcctaagcgactcaacttcaagctcttcaacattcaggtcaaagaggttacggacaacaatggagtcaagaccatcgccaataaccttaccagcacggtccaggtcttcacggactcagactatcagctcccgtacgtgctcgggtcggctcacgagggctgcctccctccgttcccggcggacgtgttcatgattccgcagtacggctacctaacgctcaacaatggcagccaggcagtgggacggtcatccttttactgcctggaatactttccttcgcagatgctgagaaccggcaacaacttccagtttacttacaccttcgaggacgtgcctttccacagcagctacgctcacagccagagtctggaccgtctcatgaatcctctgattgaccagtacctgtactacttgtctcggactcaaacaacaggaggcacggcaaatacgcagactctgggcttcagccaaggtgggcctaatacaatggccaatcaggcaaagaactggctgccaggaccctgttaccgccaacaacgcgtctcaacgacaaccgggcaaaacaacaatagcaactttgcctggactgctgggaccaaataccatctgaatggaagaaattcattggctaatcctggcatcgctatggcaacacacaaagacgacaaggagcgtttttttcccagtaacgggatcctgatttttggcaaacaaaatgctgccagagacaatgcggattacagcgatgtcatgctcaccagcgaggaagaaatcaaaaccactaaccctgtggctacagaggaatacggtatcgtagcagataacttgcagcagcaaaacacggctcctcaaattggaactgtcaacagccagggggccttacccggtatggtctggcagaaccgggacgtgtacctgcagggtcccatctgggccaagattcctcacacggacggcaacttccacccgtctccgctgatgggcggctttggcctgaaacatcctccgcctcagatcctgatcaagaacacgcctgtacctgcggatcctccgaccaccttcaaccagtcaaagctgaactctttcatcacgcaatacagcaccggacaggtcagcgtggaaattgaatgggagctgcagaaggaaaacagcaagcgctggaaccccgagatccagtacacctccaactactacaaatctacaagtgtggactttgctgttaatacagaaggcgtgtactctgaaccccaccccattggcacccgttacctcacccgtcccctgtaa

SEQ ID NO: 1014 - DNA, 2211 bp, Artificial Sequence
  source: /note="Description of Artificial Sequence: Synthetic polynucleotide"
atggctgccgatggttatcttccagattggctcgaggacactctctctgaaggaataagacagtggtggaagctcaaacctggcccaccaccaccaaagcccgcagagcggcataaggacgacagcaggggtcttgtgcttcctgggtacaagtacctcggacccttcaacggactcgacaagggagagccggtcaacgaggcagacgccgcggccctcgagcacgacaaagcctacgaccggcagctcgacagcggagacaacccgtacctcaagtacaaccacgccgacgcggagtttcaggagcgccttaaagaagatacgtcttttgggggcaacctcgggcgagcagtcttccaggccaagaagagggttctcgaaccttttggtctggttgaggaagcggctaagacggctcctggaaagaaacgtccggtagagcagtcgccacaagagccagactcctcctcgggcattggcaagacaggccagcagcccgctaaaaagagactcaattttggtcagactggcgactcagagtcagtccccgacccacaacctctcggagaacctccagcaacccccgctgctgtgggacctactacaatggcttcaggcggtggcgcaccaatggcagacaataacgaaggcgccgacggagtgggtaatgcctcaggaaattggcattgcgattccacatggctgggcgacagagtcatcaccaccagcacccgaacatgggccttgcccacctataacaaccacctctacaagcaaatctccagtgcttcaacgggggccagcaacgacaaccactacttcggctacagcaccccctgggggtattttgacttcaacagattccactgccacttctcaccacgtgactggcagcgactcatcaacaacaactggggattccggcctaagcgactcaacttcaagctcttcaacattcaggtcaaagaggttacggacaacaatggagtcaagaccatcgccaataaccttaccagcacggtccaggtcttcacggactcagactatcagctcccgtacgtgctcgggtcggctcacgagggctgcctcccgccgttcccagcggacgttttcatgattcctcagtacggctacctaacactcaacaacggtagtcaggccgtgggacgctcctccttctactgcctggaatactttccttcgcagatgctgagaacgggcaacaactttaccttcagctacacctttgaggacgttcctttccacagcagctacgctcacagccagagtctggaccgtctcatgaatcctctgattgaccagtacctgtactacttgtctcggactcaaacaacaggaggcacggcaaatacgcagactctgggcttcagccaaggtgggcctaatacaatggccaatcaggcaaagaactggctgccaggaccctgttaccgccaacaacgcgtctcaacgacaaccgggcaaaacaacaatagcaactttgcctggactgctgggacaaaataccatctgaatggaagaaattcattggctaatcctggcatcgctatggcaacacacaaagacgacaaggagcgtttttttcccagtaacgggattctgatttttggcaaacaaaatgctgccagagacaatgcggattacagcgatgtcatgctcaccagcgaggaagaaatcaaaaccactaaccctgtggctacagaggaatacggtatcgtggcagataacttgcagcagcaaaacacggctcctcaaattggaactgtcaacagccagggggccttacccggtatggtctggcagaaccgggacgtgtacctgcagggtcccatctgggccaagattcctcacacggacggcaacttccacccgtctccgctgatgggcggctttggacttaagcacccgcctcctcagatcctcatcaaaaacacgcctgttcctgcggatcctccgaccaccttcaaccagtcaaagctgaactctttcatcacgcaatacagcaccggacaggtcagcgtggaaattgaatgggagctgcagaaggaaaacagcaagcgctggaaccccgagatccagtacacctccaactactacaaatctacaagtgtggactttgctgttaatacagaaggcgtgtactctgaaccccaccccattggcacccgttacctcacccgtcccctgtaa

SEQ ID NO: 1015 - DNA, 2211 bp, Artificial Sequence
  source: /note="Description of Artificial Sequence: Synthetic polynucleotide"
atggctgccgatggttatcttccagattggctcgaggacaacctctctgagggcattcgcgagtggtgggcgctgaaacctggagccccgaagcccaaagccaaccagcaaaagcaggacgacggccggggtctggtgcttcctggctacaagtacctcggacccttcaacggactcgacaaaggagagccggtcaacgcggcggacgcagcggccctcgagcacgacaaggcctacgaccagcagctcaaagcgggtgacaatccgtacctgcggtataaccacgccgacgccgagtttcaggagcgtctgcaagaagatacgtcttttgggggcaacctcgggcgagcagtcttccaggccaagaagcgggttctcgaacctctcggtctggttgaggaaggcgctaagacggctcctggaaagaaacgtccggtagagcagtcgccacaagagccagactcctcctcgggcatcggcaagacaggccagcagcccgctaaaaagagactcaattttggtcagactggcgactcagagtcagtccccgacccacaacctctcggagaacctccagcaacccccgctgctgtgggacctactacaatggcttcaggcggtggcgcaccaatggcagacaataacgaaggcgccgacggagtgggtagttcctcgggaaattggcattgcgattccacatggctgggcgacagagtcatcaccaccagcacccgcacctgggccttgcccacctacaataaccacctctacaagcaaatctccagtgcttcaacgggggccagcaacgacaaccactacttcggctacagcaccccctgggggtattttgacttcaacagattccactgccacttctcaccacgtgactggcagcgactcatcaacaacaactggggattccggcctaagcgactcaacttcaagctcttcaacattcaggtcaaagaggttacggacaacaatggagtcaagaccatcgccaataaccttaccagcacggtccaggtcttcacggactcggagtaccagttgccgtacgtcctcggctctgcgcaccagggctgcctccctccgttcccggcggacgtgttcatgattccgcagtacggctacctaacgctcaacaatggcagccaggcagtgggacggtcatccttttactgcctggaatatttcccatcgcagatgctgagaacgggcaacaactttaccttcagctacacctttgaggacgttcctttccacagcagctacgctcacagccagagtctggaccgtctcatgaatcctctgattgaccagtacctgtactacttgtctcggactcaaacaacaggaggcacggcaaatacgcagactctgggcttcagccaaggtgggcctaatacaatggccaatcaggcaaagaactggctgccaggaccctgttaccgccaacaacgcgtctcaacgacaaccgggcaaaacaacaatagcaactttgcctggactgctgggaccaaataccatctgaatggaagaaattcattggctaatcctggcatcgctatggcaacacacaaagacgacaaggagcgtttttttcccagtaacgggatcctgatttttggcaaacaaaatgctgccagagacaatgcggattacagcgatgtcatgctcaccagcgaggaagaaatcaaaaccactaaccctgtggctacagaggaatacggtatcgtggcagataacttgcagcagcaaaacacggctcctcaaattggaactgtcaacagccagggggccttacccggtatggtctggcagaaccgggatgtgtacctgcagggtcccatctgggccaagattcctcacacggacggcaacttccacccgtctccgctgatgggcggctttggcctgaaacatcctccgcctcagatcctgatcaagaacacgcctgtacctgcggatcctccgaccaccttcaaccagtcaaagctgaactctttcatcacgcaatacagcaccggacaggtcagcgtggaaattgaatgggagctgcagaaggaaaacagcaagcgctggaaccccgagatccagtacacctccaactactacaaatctacaagtgtggactttgctgttaatacagaaggcgtgtactctgaaccccaccccattggcacccgttacctcacccgtcccctgtaa

SEQ ID NO: 1016 - DNA, 2214 bp, Artificial Sequence
  source: /note="Description of Artificial Sequence: Synthetic polynucleotide"
atggctgccgatggttatcttccagattggctcgaggacaaccttagtgaaggaattcgcgagtggtgggcgctgaaacctggagccccgaagcccaaagccaaccagcaaaagcaggacgacggccggggtctggtgcttcctggctacaagtacctcggacccttcaacggactcgacaagggggagcccgtcaacgcggcggacgcagcggccctcgagcacgacaaggcctacgaccagcagctcaaagcgggtgacaatccgtacctgcggtataaccacgccgacgccgagtttcaggagcgtctgcaagaagatacgtcttttgggggcaacctcgggcgagcagtcttccaggccaagaagcgggttctcgaacctctcggtctggttgaggaaggcgctaagacggctcctggaaagaaacgtccggtagagcagtcgccacaagagccagactcctcctcgggcatcggcaagacaggccagcagcccgctaaaaagagactcaatttcggtcagactggcgacacagagtcagtcccagaccctcaaccaatcggagaacctcccgcagccccctcaggtgtgggatctcttacaatggcttcaggtggtggcgcaccagtggcagacaataacgaaggtgccgatggagtgggtagttcctcgggaaattggcattgcgattcccaatggctgggggacagagtcatcaccaccagcaccagaacctgggccttgcccacctacaataaccacctctacaagcaaatctccaacagcacatctggaggatcttcaaatgacaacgcctacttcggctacagcaccccctgggggtattttgactttaacagattccactgccacttttcaccacgtgactggcagcgactcatcaacaacaactggggattccgacccaagagactcaacttcaagctcttcaacatccaggtcaaggaggtcacgcagaacgaaggcaccaagaccatcgccaataacctcaccagcaccatccaggtgtttacggactcggagtaccagctgccgtacgttctcggctccgcccaccagggctgcctgcctccgttcccggcggacgtgttcatgattccccagtacggctacctaacgctcaacaacggtagtcaggccgtgggacgctcctccttctactgcctggaatactttccttcgcagatgctgagaaccggcaacaacttccagtttacttacaccttcgaggacgtgcctttccacagcagctacgcgcacagccagagcttggaccggctgatgaatcctctgattgaccagtacctgtactacttgtctcggactcaaacaacaggaggcacggcaaatacgcagactctgggcttcagccaaggtgggcctaatacaatggccaatcaggcaaagaactggctgccaggaccctgttaccgccaacaacgcgtctcaacgacaaccgggcaaaacaacaatagcaactttgcctggactgctgggaccaaataccatctgaatggaagaaattcattggctaatcctggcatcgctatggcaacacacaaagacgacaaggagcgtttttttcccagtaacgggatcctgatttttggcaaacaaaatgctgccagagacaatgcggattacagcgatgtcatgctcaccagcgaggaagaaatcaaaaccactaaccctgtggctacagaggaatacggtatcgtggcagataacttgcagcagcaaaacacggctcctcaaattggaactgtcaacagccagggggccttacccggtatggtctggcagaaccgggacgtgtacctgcagggtcccatctgggccaagattcctcacacggacggcaacttccacccgtctccgctgatgggcggctttggcctgaaacatcctccgcctcagatcctgatcaagaacacgcctgtacctgcggatcctccgaccaccttcaaccagtcaaagctgaactctttcatcacgcaatacagcaccggacaggtcagcgtggaaattgaatgggagctgcagaaggaaaacagcaagcgctggaaccccgagatccagtacacctccaactactacaaatctacaagtgtggactttgctgttaatacagaaggcgtgtactctgaaccccaccccattggcactcgttacctcacccgtcccctgtaa

SEQ ID NO: 1017 - DNA, 2211 bp, Artificial Sequence
  source: /note="Description of Artificial Sequence: Synthetic polynucleotide"
atggctgccgatggttatcttccagattggctcgaggacaacctctctgagggcattcgcgagtggtgggcgctgaaacctggagccccgaagcccaaagccaaccagcaaaagcaggacgacggccggggtctggtgcttcctggctacaagtacctcggacccttcaacggactcgacaagggggagcccgtcaacgcggcggatgcagcagccctcgaacacgacaaagcttacgaccagcagctcaaggccggtgacaacccctacctcaagtataaccacgccgacgccgagtttcaggagcgtcttcaaggagatacgtcttttgggggcaacctcggacgagcagtcttccaggccaagaagcgggttctcgaacctcttggtctggttgaggaagcggctaagacggctcctggaaagaagaggcctgtagagcagtctcctcaggaaccggactcctccgcgggtattggcaaatcgggtgcacagcccgctaaaaagagactcaatttcggtcagactggcgacacagagtcagtcccagaccctcaacctctcggagaacctccagcagcgccctctggtgtgggacctaatacaatggctgcaggcggtggcgcaccaatggcagacaataacgaaggtgccgatggagtgggtagttcctcgggaaattggcattgcgattcccaatggctgggggacagagtcatcaccaccagcacccgaacctgggccctgcccacctacaacaaccacctctacaagcaaatctccagtgcttcaacgggggccagcaacgacaaccactacttcggctacagcaccccttgggggtattttgacttcaacagattccactgccacttctcaccacgtgactggcagcgactcatcaacaacaactggggattccggcctaagcgactcaacttcaagctcttcaacattcaggtcaaagaggttacggacaacaatggagtcaagaccatcgccaataaccttaccagcacggtccaggtcttcacggactcggagtaccagttgccgtacgtcctcggctctgcgcaccagggctgcctccctccgttcccggcggacgtgttcatgattccgcagtacggctacctaacgctcaacaatggcagccaggcagtgggacggtcatccttttactgcctggaatatttcccatcgcagatgctgagaacgggcaacaactttaccttcagctacacctttgaggacgttcctttccacagcagctacgctcacagccagagtctggaccgtctcatgaatcctctgattgaccagtacctgtactacttgtctcggactcaaacaacaggaggcacggcaaatacgcagactctgggcttcagccaaggtgggcctaatacaatggccaatcaggcaaagaactggctgccaggaccctgttaccgccaacaacgcgtctcaacgacaaccgggcaaaacaacaatagcaactttgcctggactgctgggaccaaataccatctgaatggaagaaattcattggctaatcctggcatcgctatggcaacacacaaagacgacaaggagcgtttttttcccagtaacgggatcctgatttttgacaaacaaaatgctgccagagacaatgcggattacagcgatgtcatgctcaccagcgaggaagaaatcaaaaccactaaccctgtggctacagaggaatacggtatcgtggcagataacttgcagcagcaaaacacggctcctcaaattggaactgtcaacagccagggggccttacccggtatggtctggcagaaccgggatgtgtacctgcagggtcccatctgggccaagattcctcacacggacggcaacttccacccgtctccgctgatgggcggctttggcctgaaacatcctccgcctcagatcctgatcaagaacacgcctgtacctgcggatcctccgaccaccttcaaccagtcaaagctgaactctttcatcacgcaatacagcaccggacaggtcagcgtggaaattgaatgggagctgcagaaggaaaacagcaagcgctggaaccccgagatccagtacacctccaactactacaaatctacaagtgtggactttgctgttaatacagaaggcgtgtactctgaaccccaccccattggcacccgttacctcacccgtcccctgtaa

SEQ ID NO: 1018 - DNA, 2211 bp, Artificial Sequence
  source: /note="Description of Artificial Sequence: Synthetic polynucleotide"
atggctgccgatggttatcttccagattggctcgaggacactctctctgaaggaataagacagtggtggaagctcaaacctggcccaccaccaccaaagcccgcagagcggcataaggacgacagcaggggtcttgtgcttcctgggtacaagtacctcggacccttcaacggactcgacaagggagagccggtcaacgaggcagacgccgcggccctcgagcacgacaaagcctacgaccggcagctcgacagcggagacaacccgtacctcaagtacaaccacgccgacgcggagtttcaggagcgccttaaagaagatacgtcttttgggggcaacctcggacgagcagtcttccaggcgaaaaagagggttcttgaacctctgggcctggttgaggaacctgttaagacggctccgggaaaaaagaggccggtagagcactctcctgtggagccagactcctcctcgggaaccggaaaggcgggccagcagcctgcaagaaaaagattgaattttggtcagactggcgactcagagtcagtccccgacccacaacctctcggagaacctccagcaacccccgctgctgtgggacctaatacgatggctacaggcagtggcgcaccaatggcagacaataacgagggcgccgacggagtgggtaattcctcgggaaattggcattgcgattccacatggatgggcgacagagtcatcaccaccagcaccagaacctgggccctgcccacttacaacaaccatctctacaagcaaatctccagtgcttcaacgggggccagcaacgacaaccactacttcggctacagcaccccctgggggtattttgacttcaacagattccactgccacttctcaccacgtgactggcagcgactcatcaacaacaactggggattccggcctaagcgactcaacttcaagctcttcaacattcaggtcaaagaggttacggacaacaatggagtcaagaccatcgccaataaccttaccagcaccatccaggtctttacggactcggaataccagctgccgtacgttctcggctctgcccaccagggctgcctgcctccgttcccggcggacgtgttcatgattccccagtacggctacctaacactcaacaacggtagtcaggccgtgggacgctcctccttctactgcctggaatatttcccatcgcagatgctgagaacgggcaacaactttaccttcagctacacctttgaggacgttcctttccacagcagctacgctcacagccagagtctggaccgtctcatgaatcctctgattgaccagtacctgtactacttgtctcggactcaaacaacaggaggcaaggcaaatacgcagactctgggcttcagccaaggtgggcctaatacaatggccaatcaggcaaagaactggctgccaggaccctgttaccgccaacaacgcgtctcaacgacaaccgggcaaaacaacaatagcaactttgcctggactgctgggaccaaataccatctgaatggaagaaattcattggctaatcctggcatcgctatggcaacacacaaagacgacaaggagcgtttttttcccagtaacgggatcctgatttttggcaaacaaaatgctgccagagacaatgcggattacagcgatgtcatgctcaccagcgaggaagaaatcaaaaccactaaccctgtggctacagaggaatacggtatcgtggcagataacttgcagcagcaaaacacggctcctcaaattggaactgtcaacagccagggggccttacccggtatggtctggcagaaccgggacgtgtacctgcagggtcccatctgggccaagattcctcacacggacggcaacttccacccgtctccgctgatgggcggctttggcctgaaacatcctccgcctcagatcctgatcaagaacacgcctgtacctgcggatcctccgaccaccttcaaccagtcaaagctgaactctttcatcacgcaatacagcaccggacaggtcagcgtggaaattgaatgggagctgcagaaggaaaacagcaagcgctggaaccccgagatccagtacacctccaactactacaaatctacaagtgtggactttgctgttaatacagaaggcgtgtactctgaaccccaccccattggcacccgttacctcacccgtcccctgtaa

SEQ ID NO: 1019 - DNA, 2211 bp, Artificial Sequence
  source: /note="Description of Artificial Sequence: Synthetic polynucleotide"
atggctgccgatggttatcttccagattggctcgaggacaacctctctgagggcattcgcgagtggtgggcgctgaaacctggagccccgaagcccaaagccaaccagcaaaagcaggacgacggccggggtctggtgcttcctggctacaagtacctcggacccttcaacggactcgacaagggggagcccgtcaacgcggcggacgcagcggccctcgagcacgacaaggcctacgaccagcagctcaaagcgggtgacaatccgtacctgcggtataaccacgccgacgccgagtttcaggagcgtctgcaagaagatacgtcttttgggggcaacctcgggcgagcagtcttccaggccaagaagcgggttctcgaaccttttggtctggttgaggaaggtgctaagacggctcctggaaagaaacgtccggtagagcagtcgccacaagagccagactcctcctcgggcatcggcaagacaggccagcagcccgctaaaaagagactcaattttggtcagactggcgactcagagtcagtccccgacccacaacctctcggagaacctccagcaacccccgctgctgtgggacctactacaatggcttcaggcggtggcgcaccaatggcggacaataacgaaggcgccgacggagtgggtaatgcctcaggaaattggcattgcgattccacatggctgggcgacagagtcatcaccaccagcacccgcacctgggccttgcccacctacaataaccacctctacaagcaaatctccagtgcttcaacgggggccagcaacgacaaccactacttcggctacagcaccccctgggggtattttgacttcaacagattccactgccacttttcaccacgtgactggcaaagactcatcaacaacaactggggattccggcctaagcgactcaacttcaagctcttcaacattcaggtcaaagaggttacggacaacaatggagtcaagaccatcgccaataaccttaccagcacggtccaggtcttcacggactcggagtaccagttgccgtacgtcctcggctctgcgcaccagggctgcctccctccgttcccggcggacgtgttcatgattccgcagtacggctacctaacgctcaacaatggcagccaggcagtgggacggtcatccttttactgcctggaatatttcccatcgcagatgctgagaacgggcaacaactttaccttcagctacacctttgaggacgttcctttccacagcagctacgctcacagccagagtctggaccgtctcatgaatcctctgattgaccagtacctgtactacttgtctcggactcaaacaacaggaggcacgggaaatacgcagactctgggcttcagccaaggtgggcctaatacaatggccaatcaggcaaagaactggctgccaggaccctgttaccgccaacaacgcgtctcaacgacaaccgggcaaaacaacaatagcaactttgcctggactgctgggaccaaataccatctgaatggaagaaattcattggctaatcctggcatcgctatggcaacacacaaagacgacaaggagcgtttttttcccagtaacgggatcctgatttttggcaaacaaaatgctgccagagacaatgcggattacagcgatgtcatgctcaccagcgaggaagaaatcaaaaccactaaccctgtggctacagaggaatacggtatcgtggcagataacttgcagcagcaaaacacggctcctcaaattggaactgtcaacagccagggggccttacccggtatggtctggcagaaccgggacgtgtacctgcagggtcccatctgggccaagattcctcacacggacggcaacttccacccgtctccgctgatgggcggctttggcctgaaacatcctccgcctcagatcctgatcaagaacacgcctgtacctgcggatcctccgaccaccttcaaccagtcaaagctgaactctttcatcacgcaatacagcaccggacaggtcagcgtggaaattgaatgggagctgcagaaggaaaacagcaagcgctggaaccccgagatccagtacacctccaactactacaaatctacaagtgtggactttgctgttaatacagaaggcgtgtactctgaaccccaccccattggcacccgttacctcacccgtcccctgtaa

SEQ ID NO: 1020 - DNA, 2211 bp, Artificial Sequence
  source: /note="Description of Artificial Sequence: Synthetic polynucleotide"
atggctgccgatggttatcttccagattggctcgaggacaacctctctgagggcattcgcgagtggtgggacttgaaacctggagccccgaaacccaaagccaaccagcaaaagcaggacgacggccggggtctggtgcttcctggctacaagtacctcggacccttcaacggactcgacaagggggagcccgtcaacgcggcggacgcagcggccctcgagcacgacaaggcctacgaccagcagctcaaagcgggtgacaatccgtacctgcggtataaccacgccgacgccgagtttcaggagcgtctgcaagaagatacgtcttttgggggcaacctcgggcgagcagtcttccaggccaagaagcgggttctcgaacctctcggtctggttgaggaaggcgctaagacggctcctggaaagaagaggcctgtagagcagtcgccacaagagccagactcctcctcgggcatcggcaagacaggccagcagcccgctaaaaagagactcaattttggtcagactggcgactcagagtcagtccccgatccacaacctctcggagaacctccagcaacccccgctgctgtgggacctactacaatggcttcaggcggtggcgcaccaatggcagacaataacgaaggcgccgacggagtgggtagttcctcgggaaattggcattgcgattccacatggctgggcgacagagtcatcaccaccagcacccgaacatgggccttgcccacctataacaaccacctctacaagcaaatctccagtgcttcaacgggggccagcaacgacaaccactacttcggctacagcaccccctgggggtattttgacttcaacagattccactgccacttctcaccacgtgactggcagcgactcatcaacaacaactggggattccggcctaagcgactcaacttcaagctcttcaacatccaggtcaaggaggtcacgcagaatgaaggcaccaagaccatcgccaataacctcaccagcaccatccaggtgtttacggactcggagtaccagcttccgtacgtcctcggctctgcgcaccagggctgcctccctccgttcccggcggacgtgttcatgattccgcagtacggctacctaacgctcaacaatggcagccaggcagtgggacggtcatccttttactgcctggaatatttcccatcgcagatgctgagaacgggcaacaactttaccttcagctacacctttgaggacgttcctttccacagcagctacgcgcacagccagagcttggaccggctgatgaatcctctgattgaccagtacctgtactacttgtctcggactcaaacaacaggaggcacggcaaatacgcagactctgggcttcagccaaggtgggcctaatacaatggccaatcaggcaaagaactggctgccaggaccctgttaccgccaacaacgcgtctcaacgacaaccgggcaaaacaacaatagcaactttgcctggactgctgggaccaaataccatctgaatggaagaaattcattggctaatcctggcatcgctatggcaacacacaaagacgacaaggagcgtttttttcccagtaacgggatcctgatttttggcaaacaaaatgctgccagagacaatgcggattacagcgatgtcatgctcaccagcgaggaagaaatcaaaaccactaaccctgtggctacagaggaatacggtatcgtggcagataacttgcagcagcaaaacacggctcctcaaattggaactgtcaacagccagggggccttacccggtatggtctggcagaaccgggacgtgtacctgcagggtcccatctgggccaagattcctcacacggacggcaacttccacccgtctccgctgatgggcggctttggcctgaaacatcctccgcctcagatcctgatcaagaacacgcctgtacctgcggatcctccgaccaccttcaaccagtcaaagctgaactctttcatcacgcaatacagcaccggacaggtcagcgtggaaattgaatgggagctgcagaaggaaaacagcaagcgctggaaccccgagatccagtacacctccaactactacaaatctacaagtgtggactttgctgttaatacagaaggcgtgtactctgaaccccaccccattggcacccgttacctcacccgtcccctgtaa

SEQ ID NO: 1021 - DNA, 2211 bp, Artificial Sequence
  source: /note="Description of Artificial Sequence: Synthetic polynucleotide"
atggctgccgatggttatcttccagattggctcgaggacaacctctctgagggcattcgcgagtggtgggcgctgaaacctggagccccgaagcccaaagccaaccagcaaaagcaggacgacggccggggtctggtgcttcctggctacaagtacctcggacccttcaacggactcgacaagggggagcccgtcaacgcggcggatgcagcggccctcgagcacgacaaggcctacgaccagcagctcaaagcgggtgacaatccgtacctgcggtataaccacgccgacgccgagtttcaggagcgtctgcaagaagatacgtcttttgggggcaacctcgggcgagcagtcttccaggccaagaagcgggttctcgaacctctcggtctggttgaggaaggcgctaagacggctcctggaaagaaacgtccggtagagcagtcgccacaagagccagactcctcctcgggcatcggcaagacaggccagcagcccgctaaaaagagactcaattttggtcagactggcgactcagagtcagtccccgacccacaacctctcggagaacctccagcaacccccgctgctgtgggacctactacaatggctgcaggcggtggcgcaccaatggcagacaataacgaaggcgccgacggagtgggtagttcctcgggaaattggcattgcgattccacatggatgggcgacagagtcatcaccaccagcacccgaacctgggccttgcccacctataacaaccatctctacaagcaaatctccagtgcttcaacgggggccagcaacgacaaccactacttcggctacagcaccccctgggggtattttgacttcaacagattccactgccacttctcaccacgtgactggcagcgactcatcaacaacaactggggattccggcccaagagactcagcttcaagctcttcaacatccaggtcaaggaggtcacgcagaatgaaggcaccaagaccatcgccaataacctcaccagcaccatccaggtgtttacggactcggagtaccagctgccgtacgtcctcggctctgcgcaccagggctgcctccctccgttcccggcggacgtgttcatgattccgcagtacggctacctaacgctcaacaatggcagccaggcagtgggacggtcatccttttactgcctggaatatttcccatcgcagatgctgagaacgggcaacaactttaccttcagctacacctttgaggacgttcctttccacagcagctacgctcacagccagagcttggaccggctgatgaatcctctgattgaccagtacctgtactacttgtctcggactcaaacaacaggaggcacggcaaatacgcagactctgggtttcagccaaggtgggcctaatacaatggccaatcaggcaaagaactggctgcaaggaccctgttaccgccaacaacgcgtctcaacgacaaccgggcaaaacaacaatagcaactttgcctggactgctgggaccaaataccatctgaatggaagaaattcattggctaatcctggcatcgctatggcaacacacaaagacgacaaggagcgtttttttcccagtaacgggatcctgatttttggcaaacaaaatgctgccagagacaatgcggattacagcgatgtcatgctcaccagcgaggaagaaatcaaaaccactaaccctgtggctacagaggaatacggtatcgtggcagataacttgcagcagcaaaacacggctcctcaaattggaactgtcaacagccagggggccttacccggtatggtctggcagaacctggacgtgtacctgcagggtcccatctgggccaagattcctcacacggacggcaacttccacccgtctccgctgatgggcggctttggcctgaaacatcctccgcctcagatcctgatcaagaacacgcctgtacctgcggatcctccgaccaccttcaaccagtcaaagctgaactctttcatcacgcaatacagcaccggacaggtcagcgtggaaattgaatgggagctgcagaaggaaaacagcaagcgctggaaccccgagatccagtacacctccaactactacaaatctacaagtgtggactttgctgttaatacagaaggcgtgtactctgaaccccaccccattggcacccgttacctcacccgtcccctgtaa

SEQ ID NO: 1022 - DNA, 2214 bp, Artificial Sequence
  source: /note="Description of Artificial Sequence: Synthetic polynucleotide"
atggctgccgatggttatcttccagattggctcgaggacaacctctctgagggcattcgcgagtggtgggcgctgaaacctggagccccgaagcccaaagccaaccagcaaaagcaggacgacggccggggtctggtgcttcctggctacaagtacctcggacccttcaacggactcgacaagggagagcccgtcaacgcggcggacgcagcggccctcgagcacgacaaggcctacgaccagcagctcaaagcgggtgacaatccgtacctgcggtataaccacgccgacgccgagtttcaggagcgtctgcaagaagatacgtcttttgggggcaacctcgggcgagcagtcttccaggccaagaagcgggttctcgaacctctcggtctggttgaggaaggcgctaagacggctcctggaaagaagagaccggtagagccatcaccccagcgttctccagactcctcctcgggcatcggcaagacaggccagcagcccgctaaaaagagactcaattttggtcagactggcgactcagagtcagtccccgacccacaacctctcggagaacctccagcaacccccgctgctgtgggacctactacaatggcttcaggtggtggcgcaccaatggcagacaataacgaaggcgccgacggagtgggtaatgcctcaggaaattggcattgcgattcccaatggctgggcgacagagtcatcaccaccagcacccgaacatgggccttgcccacctataacaaccacctctacaagcaaatctccagtgcttcaacgggggccagcaacgacaaccactacttcggctacagcaccccctgggggtattttgacttcaacagattccactgccacttttcaccacgtgactggcagcgactcatcaacaacaactggggattccggcctaagcgactcaacttcaagctcttcaacattcaggtcaaagaggttacggacaacaatggagtcaagaccatcgccaataaccttaccagcacggtccaggtcttcacggactcagactatcagctcccgtacgtgctcgggtcggctcacgagggctgcctcccgccgttcccagcggacgttttcatgattccccagtacggctacctaacactcaacaacggtagtcaggccgtgggacgctcctccttctactgcctggaatactttccttcgcagatgctgagaaccggcaacaacttccagtttacttacaccttcgaggacgtgcctttccacagcagctacgctcacagccagagcttggaccggctgatgaatcctctgattgaccagtacctgtactacttgtctcggactcaaacaacaggaggcacggcaaatacgcagactttgggcttcagccaaggtgggcctaatacaatggccaatcaggcaaagaactgggtgccaggaccctgttaccgccaacaacgggtttcaacggcaaccgggcaaaacaacaatagcaactttgcctggactgctgggaccaaataccatctgaaaggaagaaattcattggctaatcctggcatcgctatggcaacacacaaagacgacaaggagcgtttttttcccagtaacgggatcctgatttttggcaaacaaaatgctgccagagacaatgcggattacagcgatgtcatgctcaccagcgaggaagaaatcaaaaccactaaccctgtggctacagaggaatacggtatcgtggcagataacttgcagcagcaaaacacggctcctcaaattggaactgtcaacagccagggggccttacccggtatggtctggcagaaccgggacgtgtacctgcagggtcccatctgggccaagattcctcacacggacggcaacttccacccgtctccgctgatgggcggctttggcctgaaacatcctccgcctcagatcctgatcaagaacacgcctgtacctgcggatcctccgaccaccttcaaccagtcaaagctgaactctttcatcacgcaatacagcaccggacaggtcagcgtggaaattgaatgggagctgcagaaggaaaacagcaaacgctggaacccagagattcaatacacttccaactactacaaatctacaagtgtggactttgctgttaatacagaaggcgtgtactctgaaccccaccccattggcacccgttacctcacccgtcccctgtaa

SEQ ID NO: 1023 - DNA, 2214 bp, Artificial Sequence
  source: /note="Description of Artificial Sequence: Synthetic polynucleotide"
  modified_base (676)..(676): a, c, g, or t
  modified_base (697)..(697): a, c, g, or t
  modified_base (715)..(715): a, c, g, or t
  modified_base (748)..(748): a, c, g, or t
  modified_base (750)..(750): a, c, g, or t
  modified_base (757)..(757): a, c, g, or t
  modified_base (763)..(763): a, c, g, or t
atggctgccgatggttatcttccagattggctcgaggacactctctctgaaggaataagacagtggtggaagctcaaacctggcccaccaccaccaaagcccgcagagcggcataaggacgacagcaggggtcttgtgcttcctgggtacaagtacctcggacccttcaacggactcgacaagggagagccggtcaacgaggcagacgccgcggccctcgagcacgacaaagcctacgaccggcagctcgacagcggagacaacccgtacctcaagtacaaccacgccgacgcggagtttcaggagcgccttaaagaagatacgtcttttgggggcaacctcggacgagcagtcttccaggcgaaaaagagggttcttgaacctctcggtctggttgaggaaggcgctaagacggctcctggaaagaaacgtccggtagagcagtcgccacaagagccagactcctcctcgggcatcggcaagacaggccagcagcccgctaaaaagagactcaattttggtcagactggcgactcagagtcagtccccgacccacaacctctcggagaacctccagcaacgccctctggtgtgggacctaatacaatggctgcaggcggtggcgctccaatggcagacaataacgaaggcgccgacggagtgggtagttcctcangaaattggcattgcgattccncatggctgggcgacagantcatcaccaccagcacccgaacctgggccctgncnacctacnacaacnacctctacaagcaaatctccaacagcacatctggaggagccaccaacgacaacacctacttcggctacagcaccccctgggggtattttgactttaacagattccactgccacttttcaccacgtgactggcagcgactcatcaacaacaactggggattccggcctaagcgactcaacttcaagctcttcaacatccaggtcaaggaggtcacgcagaatgaaggcaccaagaccatcgccaataacctcaccagcaccatccaggtgtttacggactcggagtaccagctgccgtacgttctcggctctgcccaccagggctgcctgcctccgttcccggcggacgtgttcatgattccccagtacggctacctaacactcaacaacggtagtcaggccgtgggacgctcctccttctactgcctggaatactttccttcgcagatgctgagaaccggcaacaacttccagtttacttacaccttcgaggacgtgcctttccacagcagctacgcccacagccagagcttggaccggctgatgaatcctctgattgaccagtacctgtactacttgtctcggactcaaacaacaggaggcacggcaaatacgcagactctgggcttcagccaaggtgggcctaatacaatggccaatcaggcaaagaactggctgccaggaccctgttaccgccaacaacgcgtctcaacgacaaccgggcaaaacaacaatagcaactttgcctggactgctgggaccaaataccatctgaatggaagaaattcattggctaatcctggcatcgctatggcaacacacaaagacgacaaggagcgtttttttcccagtaacgggatcctgatttttggcaaacaaaatgctgccagagacaatgcggattacagcgatgtcatgctcaccagcgaggaagaaatcaaaaccactaaccctgtggctacagaggaatacggtatcgtggcagataacttgcagcagcaaaacacggctcctcaaattggaactgtcaacagccagggggccttacccggtatggtttggcagaaccgggacgtgtacctgcagggtcctatctgggccaagattcctcacacggacggaaactttcatccctcgccgctgatgggaggctttggactgaaacacccgcctcctcagatcctgattaagaatacacctgttcccgcggatcctccaactaccttcagtcaagctaagctggcgtcgttcatcacgcaatacagcacaggacaagtgagtgtggaaattgaatgggagctgcagaaagaaaacagcaagcgctggaatcccgaagtgcagtacacatccaattatgcaaaatctgccaacgttgattttactgtggacaacaatggactttatactgagcctcgccccattggcacccgttaccttacccgtcccctgtaa

SEQ ID NO: 1024 - DNA, 2214 bp, Artificial Sequence
  source: /note="Description of Artificial Sequence: Synthetic polynucleotide"
atggctgccgatggttatcttccagattggctcgaggacaacctctctgagggcattcgcgagtggtgggacttgaaacctggagccccgaagcccaaagccaaccagcaaaagcaggacgacggccggggtctggtgcttcctggctacaagtacctcggacccttcaacggactcgacaagggggagcccgtcaacgcggcggacgcagcggccctcgagcacgacaaggcctacgaccagcagctcaaagcgggtgacaatccgtacctgcggtataaccacgccgacgccgagtttcaggagcgtctgcaagaagatacgtcttttgggggcaacctcgggcgagcagtcttccaggccaagaagcgggttctcgaacctctcggtctggttgaggaaggcgctaagacggctcctggaaagaagagaccggtagagccatcaccccagcgttctccagactcctctacgggcatcggcaagaaaggccagcagcccgcgaaaaagagactcaactttgggcagactggcgactcagagtcagtgcccgaccctcaaccaatcggagaaccccccgcaggcccctctggtgtgggatctcttacaatggcttcaggtggtggcgcaccagtggcagacaataacgaaggtgccgatggagtgggtagttcctcgggaaattggcattgcgattcccaatggctgggggacagagtcatcaccaccagcacccgaacatgggccttgcccacctataacaaccacctctacaagcaaatctccagtgcttcaacgggggccagcaacgacaaccactacttcggctacagcaccccctgggggtattttgactttaacagattccactgccacttctcaccacgtgactggcagcgactcatcaacaacaactggggattccggcccaagagactcaacttcaagctcttcaacatccaggtcaaggaggtcacggacaatgatggagtcaagaccatcgccaataaccttaccagcacgattcaggtctttacggactcggaataccagttgccgtacgtcctcggctctgcgcaccagggctgcctgcctccgttcccggcggacgtgttcatgattccgcagtacggctacctaacgctcaacaatggcagccaggcagtgggacggtcatccttttactgcctggaatatttcccatcgcagatgctgagaacgggcaacaactttaccttcagctacacttttgaggacgttcctttccacagcagctacgctcacagccagagtctggaccgtctcatgaatcctctgattgaccagtacctgtactacttgtctcggactcaaacaacaggaggcacggcaaatacgcagactctgggcttcagccaaggtgggcctaatacaatggccaatcacgcaaagaactggctgccaggaccctgttaccgccaacaacgcgtctcaacgacaaccggacaaaacaacaatagcaactttgcctggactgctgggaccaaataccatctgaatggaagaaattcattggctaatcctggcatcgctatggcaacacacaaagacgacaaggagcgtttttttcccagtaacgggatcctgatttttggcaaacaaaatgctgccagagacaatgcggattacagcgatgtcatgctcaccagcgaggaagaaatcaaaaccactaaccctgtggctacagaggaatacggtatcgtggcagataacttgcagcagcaaaacacggctcctcaaattggaactgtcaacagccagggggccttacccggtatggtctggcagaaccgggacgtgtacctgcagggtcccatctgggccaagattcctcacacggacggcaacttccacccgtctccgctgatgggcggctttggcctgaaacatcctccgcctcagatcctgatcaagaacacgcctgtacctgcggatcctccgaccaccttcaaccagtcaaagctgaactctttcatcacgcaatacagcaccggacaggtcagcgtggaaattgaatgggagctgcagaaggaaaacagcaagcgctggaaccccgagatccagtacacctccaactactacaaatctacaagtgtggactttgctgttaatacagaaggcgtgtactctgaaccccaccccattggcacccgttacctcacccgtcccctgtaa

SEQ ID NO: 1025 - DNA, 2211 bp, Artificial Sequence
  source: /note="Description of Artificial Sequence: Synthetic polynucleotide"
atggctgccgatggttatcttccagattggctcgaggacactctctctgaaggaataagacagtggtggaagctcaaacctggcccaccaccaccaaagcccgcagagcggcacaaggacgacagcaggggtcttgtgcttcctgggtacaagtacctcggacccttcaacggactcgacaagggagagccggtcaacgaggcagacgccgcggccctcgagcacgacaaagcctacgaccggcagctcgacagcggagacaacccgtacctcaagtacaaccacgccgacgcggagtttcaggagcgccttaaagaagatacgtcttttgggggcaacctcggacgagcagtcttccaggcgaaaaagagggttcttgaacctctgggcctggttgaggaacctgttaagacggctccgggaaaaaagaggccggtagagcactctcctgtggagccagactcctcctcgggaaccggaaaggcgggccagcagcctgctaaaaagagactcaattttggtcagactggcgactcagagtcagtccccgacccacaacctctcggagaacctccagcaacccccgctgctgtgggacctactacaatggcttcaggtggtggcgcaccaatggcagacaataacgaaggcgccgacggagtgggtaatgcctcaggaaattggcattgcgattccacatggctgggcgacagagtcatcaccaccagcacccgcacctgggccttgcccacctacaataaccacctctacaagcaaatctccagtgcttcaacgggggccagcaacgacaaccactacttcggctacagcaccccctgggggtattttgacttcaacagattccactgccacttctcaccacgtgactggcagcgactcatcaacaacaactggggattccggcccaagagactcaacttcaaactcttcaacatccaagtcaaggaggtcacgcagaatgaaggcaccaagaccatcgccaataacctcaccagcaccatccaggtgtttacggactcggagtaccagctgccgtacgttctcggctctgcccaccagggctgcctgcctccgttcccggcggacgtgttcatgattccccagtacggctacctaacactcaacaacggtagtcaggccgtgggacgctcctccttctactgcctggaatactttccttcgcagatgctgagaaccggcaacaacttccagtttacttacaccttcgaggacgtgcctttccacagcagctacgcgcacagccagagcttggaccggctgatgaatcctctgattgaccagtacctgtactacttgtctcggactcaaacaacaggaggcacggcaaatacgcagactctgggcttcagccaaggtgggcctaatacaatggccaatcaggcaaagaactggctgccaggaccctgttaccgccaacaacgcgtctcaacgacaaccgggcaaaacaacaatagcaactttgcctggactgctgggaccaaataccatctgaatggaagaaattcattggctaatcctggcatcgctatggcaacacacaaagacgacaaggagcgtttttttcccagtaacgggatcctgatttttggcaaacaaaatgctgccagagacaatgcggattacagcgatgtcatgctcaccagcgaggaagaaatcaaaaccactaaccctgtggctacagaggaatacggtatcgtggcagataacttgcagcagcaaaacacggctcctcaaattggaactgtcaacagccagggggccttacccggtatggtctggcagaaccgggacgtgtacctgcagggtcccatctgggccaagattcctcacacggacggcaacttccacccgtctccgctgatgggcggctttggcctgaaacatcctccgcctcagatcctgatcaagaacacgcctgtacctgcggatcctccgaccaccttcaaccagtcaaagctgaactctttcatcacgcaatacagcaccggacaggtcagcgtggaaattgaatgggagctgcagaaggaaaacagcaagcgctggaaccccgagatccagtacacctccaactactacaaatctacaagtgtggactttgctgttaatacagaaggcgtgtactctgaaccccaccccattggcacccgttacctcacccgtcccctgtaa

SEQ ID NO: 1026 - DNA, 2211 bp, Artificial Sequence
  source: /note="Description of Artificial Sequence: Synthetic polynucleotide"
atggctgccgatggttatcttccagattggctcgaggacaacctctctgagggcattcgcgagtggtgggcgctgaaacctggagccccgaagcccaaagccaaccagcaaaagcaggacgacggccggggtctggtgcttcctggctacaagtacctcggacccttcaacggactcgacaagggggagcccgtcaacgcggcggatgcagcggccctcgagcacgacaaggcctacgaccagcagctccaagcgggtgacaatccgtacctgcggtataaccacgccgacgccgagtttcaggagcgtcttcaaggagatacgtcttttgggggcaacctcggacgagcagtcttccaggccaagaagcgggttctcgaacctctcggtctggttgaggaaggcgctaagacggctcctggaaagaaacgtccggtagagcagtcgccacaagagccagactcctcctcgggcatcggcaagacaggccagcagcccgctaaaaagagactcaattttggtcagactggcgactcagagtcagtccccgacccacaacctctcggagaacctccagcaacccccgctgctgtgggacctactacaatggcttcaggcggtggcgcaccaatggcggacaataacgaaggcgccgatggagtgggtaatgcctcaggaaattggcattgcgattccacatggctgggcgacagagtcatcaccaccagcacccgcacctgggccttgcccacctacaataaccacctctacaagcaaatctccagtgcttcaacgggggccagcaacgacaaccactacttcggctacagcaccccctgggggtattttgacttcaacagattccactgccacttctcaccacgtgactggcagcgactcatcaacaacaactggggattccggcctaagcgactcaacttcaagctcttcaacattcaggtcaaagaggttacggacaacaatggagtcaagaccatcgccaataacctcaccagcaccatccaggtgtttacggactcggagtaccagctgccgtacgttctcggctctgcccaccagggctgcctgcctccgttcccggcggacgtgttcatgattccccagtacggctacctaacactcaacaacggtagtcaggccgtgggacgctcctccttctactgcctggaatactttccttcgcagatgctgagaaccggcaacaacttccagtttacttacaccttcgaggacgtgcctttccacagcagctacgcccacagccagagcttggaccggctgatgaatcctctgattgaccagtacctgtactacttgtctcggactcaaacaacaggaggcacggcaaatacgcagactctgggcttcagccaaggtgggcctaatacaatggccaatcaggcaaagaactggctgccaggaccctgttaccgccaacaacgcgtctcaacgacaaccgggcaaaacaacaatagcaactttgcctggactgctgggaccaaataccatctgaatggaagaaattcattggctaatcctggcatcgctatggcaacacacaaagacgacaaggagcgtttttttcccagtaacgggatcctgatttttggcaaacaaaatgctgccagagacaatgcggattacagcgatgtcatgctcaccagcgaggaagaaatcaaaaccactaaccctgtggctacagaggaatacggtatcgtggcagataacttgcagcagcaaaacacggctcctcaaattggaactgtcaacagccagggggccttacccggtatggtctggcagaaccgggacgtgtacctgcagggtcccatctgggccaagattcctcacacggacggcaacttccacccgtctccgctgatgggcggctttggcctgaaacatcctccgcctcagatcctgatcaagaacacgcctgtacctgcggatcctccgaccaccttcaaccagtcaaagctgaactctttcatcacgcaatacagcaccggacaggtcagcgtggaaattgaatgggagctgcagaaggaaaacagcaagcgctggaaccccgagatccagtacacctccaactactacaaatctacaagtgtggactttgctgttaatacagaaggcgtgtactctgaaccccaccccattggcacccgttacctcacccgtcccctgtaa

SEQ ID NO: 1027 - DNA, 2217 bp, Artificial Sequence
  source: /note="Description of Artificial Sequence: Synthetic polynucleotide"
atggctgccgatggttatcttccagattggctcgaggacactctctctgaaggaataagacagtggtggaagctcaaacctggcccaccaccaccaaagcccgcagagcggcataaggacgacagcaggggtcttgtgcttcctgggtacaagtacctcggacccttcaacggactcgacaagggggagcccgtcaacgcggcggatgcagcggccctcgagcacgacaaggcctacgaccagcagctcaaagcgggtgacaatccgtacctgcggtataaccacgccgacgcggagtttcaggagcgccttaaagaagatacgtcttttgggggcaacctcggacgagcagtcttccaggcgaaaaagagggttcttgaacctctcggtctggttgaggaaggcgctaagacggctcctggaaagaagagaccggtagagccatcaccccagcgttctccagactcctctacgggcatcggcaagaaaggccaacagcccgccagaaaaagactcaattttggtcagactggcgactcagagtcagttccagaccctcaacctctcggagaacctccagcagcgccctctggtgtgggacctaatacaatggctgcaggcggtggcgcaccaatggcagacaataacgaaggcgccgacggagtgggtagttcctcgggaaattggcattgcgattcccaatggctgggggacagagtcatcaccaccagcaccagaacctgggccctgcccacctacaacaatcacctctacaagcaaatctccaacagcacatctggaggatcttcaaatgacaacgcctacttcggctacagcaccccctgggggtattttgacttcaaccgcttccactgccacttctcaccacgtgactggcagcgactcatcaacaacaactggggattccggcccaagagactcaacttcaagctcttcaacattcaggtcaaagaggttacggacaacaatggagtcaagaccatcgccaataaccttaccagcacggtccaggtctttacggactcggagtaccagttgccgtacgtcctcggctctgcgcaccagggctgcctccctccgttcccggcggacgtgttcatgattccccagtacggctacctaacactcaacaacggtagtcaggccgtgggacgctcctccttctactgcctggaatatttcccttctcagatgctgagaacgggcaacaactttaccttcagctacacctttgaggacgttcctttccacagcagctacgctcacagccagagtctggaccgtctcatgaatcctctgattgaccagtacctgtactacttgtctcggactcaaacaacaggaggcacggcaaatacgcagactctgggcttcagccaaggtgggcctaatacaatggccaatcaggcaaagaactggctgccaggaccctgttaccgccaacaacgcgtctcaacgacaaccgggcaaaacaacaatagcaactttgcctggactgctgggaccaaataccatctgaatggaagaaattcattggctaatcctggcatcgctatggcaacacacaaagacgacaaggagcgtttttttcccagtaacgggatcctgatttttggcaaacaaaatgctgccagagacaatgcggattacagcgatgtcatgctcaccagcgaggaagaaatcaaaaccactaaccctgtggctacagaggaatacggtatcgtggcagataacttgcagcagcaaaacacggctcctcaaattggaactgtcaacagccagggggccttacccggtatggtctggcagaaccgggacgtgtacctgcagggtcccatctgggcaaagattccacacacggacggacattttcacccctctcccctcatgggtggattcggacttaaacaccctcctccacagattctcatcaagaacaccccggtacctgcgaatcctccgaccaccttcaaccagtcaaagctgaactctttcatcacgcaatacagcacaggacaagtgagtgtggaaattgaatgggagctgcagaaagaaaacagcaagcgctggaatcccgaagtgcagtacacatccaattatgcaaaatctgccaacgttgattttactgtggacaacaatggactttatactgagcctcgccccattggcacccgttaccttacccgtcccctgtaa

SEQ ID NO: 1028 - DNA, 2211 bp, Artificial Sequence
  source: /note="Description of Artificial Sequence: Synthetic polynucleotide"
atggctgccgatggttatcttccagattggctcgaggacaacctctctgagggcattcgcgagtggtgggcgctgaaacctggagccccgaaacccaaagccaaccagcaaaagcaggacgacggccggggtctggtgcttcctggctacaagtacctcggacccttcaacggactcgacaagggggagcccgtcaacgcggcggacgcagcggccctcgagcacgacaaggcctacgaccagcagctcaaggcgggtgacaatccgtacctgcggtataaccacgccgacgccgagtttcaggagcgtctgcaagaagatacgtcttttgggggcaacctcgggcgagcagtcttccaggccaaaaagaggcttcttgaacctcttggtctggttgaggaaggggctaagacggctcctggaaagaaacgtccggtagagcagtcgccacaagagccagactcctcctcgggcattggcaagacaggccagcagcccgctaaaaagagactcaactttgggcagactggcgactcagagtcagtgcccgatcctcaacctctcggagaacctccagcaacccccgctgctgtgggacctactacaatggcttcaggcggtggcgcaccaatggcggacaataacgaaggcgccgatggagtgggtaattcctcgggaaattggcattgcgattccacatggatgggcgacagagtcatcaccaccagcacccgaacctgggccctgcccacctacaacaatcacctctacaagcaaatctccagtgcttcaacgggggccagcaacgacaaccactacttcggctacagcaccccctgggggtattttgatttcaacagattccactgccatttttcaccacgtgactggcagcgactcatcaacaacaactggggattccggcccaagagactcaacttcaagctcttcaacatccaggtcaaggaggtcacgcagaatgaaggcaccaagaccatcgccaataaccttaccagcacgattcaggtctttacggattcggaataccagctcccgtacgtcctcggctctgcgcaccagggctgcctccctccgttcccggcggacgtgttcattattccgcagtacggctacctaacgctcaacaatggtagccaggcagtgggacggtcatccttttactgcctggaatatttcccatcgcagatgctgagaacgggcaacaactttaccttcagctacacctttgaggacgttcctttccacagcagctacgctcacagccagagtctggaccgtctcatgaatcctctgattgaccagtacctgtactacttgtctcggactcaaacaacaggaggcacggcaaatacgcagactctgggcttcagccaaggtgggcctaatacaatggccaatcaggcaaagaactggctgccaggaccctgttaccgccaacaacgcgtctcaacgacaaccgggcaaaacaacaatagcaactttgcctggactgctgggaccaaataccatctgaatggaagaaattcattggctaatcctggcatcgctatggcaacacacaaagacgacaaggagcgtttttttcccagtaacgggatcctgatttttggcaaacaaaatgctgccagagacaatgcggattacagcgatgtcatgctcaccagcgaggaagaaatcaaaaccactaaccctgtggctacagaggaatacggtatcgtggcagataacttgcagcagcaaaacacggctcctcaaattggaactgtcaacagccagggggccttacccggtatggtctggcagaaccgggacgtgtacctgcagggtcccatctgggccaagattcctcacacggacggcaacttccacccgtctccgctgatgggcggctttggcctgaaacatcctccgcctcagatcctgatcaagaacacgccagtacctgcggatcctccgaccaccttcaaccagtcaaagctgaactctttcatcacgcaatacagcaccggacaggtcagcgtggaaattgaatgggagctgcagaaggaaaacagcaagcgctggaaccccgagatccagtacacctccaactactacaaatctacaagtgtggactttgctgttaatacagaaggcgtgtactctgaaccccaccccattggcacccgttacctcacccgtcccctgtaa

SEQ ID NO: 1029 - DNA, 2211 bp, Artificial Sequence
  source: /note="Description of Artificial Sequence: Synthetic polynucleotide"
atggctgccgatggttatcttccagattggctcgaggacaacctctctgagggcattcgcgagtggtgggcgctgaaacctggagccccgaaacccaaagccaaccagcaaaagcaggacgacggccggggtctggtgcttcctggctacaagtacctcggacccttcaacggactcgacaagggggagcccgtcaacgcggcggatgcagcggccctcgagcacgacaaggcctacgaccagcagctcaaggcgggtgacaatccgtacctgcggtataaccacgccgacgccgagtttcaggagcgtctgcaagaagatacgtcttttgggggcaacctcgggcgagcagtcttccaggccaaaaagagggttcttgaaccttttggtctggttgaggaagctgctaagacggctcctggaaagaaacgtccggtagagcagtcgccacaagagccagactcctcctcgggcattggcaagacaggccagcagcccgctaaaaagagactcaattttggtcagactggcgactcagagtcagtgcccgaccctcaacctctcggagaacctccagcaacccccgctgctgtgggacctactacaatggcttcaggcggtggcgcaccaatggcagacaataacgaaggcgccgatggagtgggtaatgcctcaggaaattggcattgcgattccacatggctgggcgacagagtcatcaccaccagcacccgaacctgggccctgcccacctacaacaatcacctctacaagcaaatctccagtgcttcaacgggggccagcaacgacaaccactacttcggctacagcaccccctgggggtattttgactttaacagattccactgccacttttcaccacgtgactggcagcgactcatcaacaacaactggggattccggcccaagagactcaacttcaagctcttcaacatccaggtcaaggaggtcacgcagaatgaaggcaccaagaccatcgccaataacctcaccagcaccattcaggtctttacggattcggaataccagctcccgtacgtcctcggctctgcccaccagggctgcctccctccgttcccggcggacgtgttcatgattccgcagtacggctacctaacgctcaacaatggtagccaggcagtgggacggtcatccttttactgcctggaatatttcccatcgcagatgctgagaacgggcaacaactttaccttcagctacacctttgaggacgttcctttccacagcagctacgctcacagccagagtctggaccgtctcatgaatcctctgattgaccagtacctgtactacttgtctcggactcaaacaacaggaggcacggcaaatacgcagactctgggcttcagccaaggtgggcctaatacaatggccaatcacgcaaagaactggctgccaggaccctgttaccgccaacaacgcgtctcaacgacaaccgggcaaaacaacaatagcaactttgcctggactgctgggaccaaataccatctgaatggaagaaattcattggctaatcctggcatcgctatggcaacacacaaagacgacaaggagcgtttttttcccagtaacgggatcctgatttttggcaaacaaaatgctgccagagacaatgcggattacagcgatgtcatgctcaccagcgaggaagaaatcaaaaccactaaccctgtggctacagaggaatacggtatcgtggcagataacttgcagcagcaaaacacggctcctcaaattggaactgtcaacagccagggggccttacccggtatggtctggcagaaccgggacgtgtacctgcagggtcccatctgggccaagattcctcacacggacggcaacttccacccgtctccgctgatgggcggctttggcctgaaacatcctccgcctcagatcctgatcaagaacacgcctgtacctgcggatcctccgaccaccttcaaccagtcaaagctgaactctttcatcacgcaatacagcaccggacaggtcagcgtggaaattgaatgggagctgcagaaggaaaacagcaagcgctggaaccccgagatccagtacacctccaactactacaaatctacaagtgtggactttgctgttaatacagaaggcgtgtactctgaaccccaccccattggcacccgttacctcacccgtcccctgtaa

SEQ ID NO: 1030 - DNA, 2211 bp, Artificial Sequence
  source: /note="Description of Artificial Sequence: Synthetic polynucleotide"
atggctgccgatggttatcttccagattggctcgaggacaacctctctgagggcattcgcgagtggtgggcgctgaaacctggagccccgaagcccaaagccaaccagcaaaagcaggacgacggccggggtctggtgcttcctggctacaagtacctcggacccttcaacggactcgacaaaggagagcccgtcaacgaggcggacgcggcggccctcgaacacgacaaggcttacgaccagcagctcaaggccggtgacaacccctacctgcggtacaaccacgccgacgccgagttccaggagcggctgcaagaagatacgtcttttgggggcaacctcgggcgagcagtcttccaggccaagaagaggcttcttgaacctcttggtctggttgaggaagcggctaagacggctcctggaaagaagaggcctgtagagcagtctcctcaggaaccggactcctccgcgggtattggcaaatcaggtgcacagcccgctaaaaagagactcaattttggtcagactggcgactcagagtcagtccccgacccacaacctctcggagaacctccagcaacccccgctgctgtgggacctactacaatggcttcaggcggtggcgcaccaatggcagacaataacgaaggcgccgatggagtgggtaatgcctcaggaaattggcattgcgattccacatggctgggcgacagagtcatcaccaccagcacccgaacctgggccctgcccacctataacaaccatctctacaagcaaatctccagtgcttcaacgggggccagtaacgacaaccactacttcggctacagcaccccctgggggtattttgactttaacagattccactgccacttctcaccacgtgactggcagcgactcatcaacaacaactggggattccggcccaagcgactcaacttcaagctcttcaacattcaggtcaaagaggttacggacaacgatggagtcaagaccatcgccaataaccttaccagcaccattcaggtgtttacggactcggaataccagctgccgtacgttctcggctccgcccaccagggctgcctgcctccgttcccggcggacgtgttcatgattccccagtacggctacctaacactcaacaacggtagtcaggccgtgggacgctcctccttctactgcctggaatactttccttcgcagatgctgagaactggcaacaacttccagtttacttacaccttcgaggacgtgcctttccacagcagctacgcccacagccagagcttggaccggctgatgaatcctctgattgaccagtacctgtactacttgtctcggactcaaacaacaggaggcacggcaaatacgcagactctgggcttcagccaaggtgggcctaatacaatggccaatcaggcaaagaactggctgccaggaccctgttaccgccaacaacgcgtctcaacgacaaccgggcaaaacaacaatagcaactttgcctggactgctgggaccaaataccatctgaatggaagaaattcattggctaatcctggcatcgctatggcaacacacaaagacgacaaggagcgtttttttcccagtaacgggatcctgatttttggcaaacaaaatgctgccagagacaatgcggattacagcgatgtcatgctcaccagcgaggaagaaatcaaaaccactaaccctgtggctacagaggaatacggtatcgtggcagataacttgcagcagcaaaacacggctcctcaaattggaactgtcaacagccagggggccttacccggtatggtctggcagaaccgggacgtgtacctgcagggtcccatctgggccaagattcctcacacggacggcaacttccacccgtctccgctgatgggcggctttggcctgaaacatcctccgcctcagatcctgatcaagaacacgcctgtacctgcggatcctccgaccaccttcaaccagtcaaagctgaactctttcatcacgcaatacagcaccggacaggtcagcgtggaaattgaatgggagctgcagaaggaaaacagcaagcgctggaaccccgagatccagtacacctccaactactacaaatctacaagtgtggactttgctgttaatacagaaggcgtgtactctgaaccccaccccattggcacccgttacctcacccgtcccctgtaa

SEQ ID NO: 1031 - DNA, 2211 bp, Artificial Sequence
  source: /note="Description of Artificial Sequence: Synthetic polynucleotide"
atggctgccgatggttatcttccagattggctcgaggacaacctctctgagggcattcgcgagtggtgggcgctgaaacctggagccccgaagcccaaagccaaccagcaaaagcaggacgacggccggggtctggtgcttcctggctacaagtacctcggacccttcaacggactcgacaagggggagcccgtcaacgcggcggatgcagcggccctcgagcacgacaaagcctacgaccagcagctcaaagcgggtgacaatccgtacctgcggtataaccacgccgacgccgagtttcaggagcgtctgcaagaagatacgtcttttgggggcaacctcgggcgagcagtcttccaggccaagaagagggttctcgaacctttgggtctggttgaggaaggggctaagacggctcctggaaagaaaaggccggtagagcagtctcctcaggaaccggactcctccgcgggtattggcaagacaggtgcacagcccgctaaaaagagactcaattttggtcagactggcgactcagagtcagtccccgacccacaacctctcggagaacctccagcaacccccgctgctgtgggacctactacaatggcttcaggcggtggcgcaccaatggcagacaataacgaaggcgccgacggagtgggtagtgcctcgggaaattggcattgcgattccacatggctgggcgacagagtcatcaccaccagcacccgaacctgggccctgcccacctataacaaccatctctacaagcaaatctccagtgcttcaacgggggccagtaacgacaaccactacttcggctacagcaccccctgggggtattttgacttcaacagattccactgccacttctcaccacgtgactggcagcgactcatcaacaacaactggggattccggcccaagcgactcaacttcaagctcttcaacattcaggtcaaagaggttacggacaacaatggagtcaagaccatcgccaataaccttaccagcacgatccaggtctttacggactcggagtaccagctgccgtacgtcctcggctctgcgcaccagggctgcctgcctccgttcccggcggacgtgttcatgattccgcagtacggctacctaacgctcaacaatggtagccaggcagtgggacggtcatccttttactgcctggaatatttcccatcgcagatgctgagaacgggcaacaactttaccttcagctacacctttgaggacgttcctttccacagcagctacgctcacagccagagtctggaccgtctcatgaatcctctgattgaccagtacctgtactacttgtctcggactcaaacaacaggaggcacggcaaatacgcagactctgggcttcagccaaggtgggcctaatacaatggccaatcaggcaaagaactggctgccaggaccctgttaccgccaacaacgcgtctcaacgacaaccgggcaaaacaacaatagcaactttgcctggactgctgggaccaaataccatctgaatggaagaaattcattggctaatcctggcatcgctatggcaacacacaaagacgacaaggagcgtttttttcccagtaacgggatcctgatttttggcaaacaaaatgctgccagagacaatgcggattacagcgatgtcatgctcaccagcgaggaagaaatcaaaaccactaaccctgtggctacagaggaatacggtatcgtggcagataacttgcagcagcaaaacacggctcctcaaattggaactgtcaacagccagggggccttacccggtatggtctggcagaaccgggacgtgtacctgcagggtcccatctgggccaagattcctcacacggacggcaacttccacccgtctccgctgatgggcggctttggcctgaaacatcctccgcctcagatcctgatcaagaacacgcctgtacctgcggatcctccgaccaccttcaaccagtcaaagctgaactctttcatcacgcaatacagcaccggacaggtcagcgtggaaattgaatgggagctgcagaaggaaaacagcaagcgctggaaccccgagatccagtacacctccaactactacaaatctacaagtgtggactttgctgttaatacagaaggcgtgtactctgaaccccaccccattggcacccgttacctcacccgtcccctgtaa

SEQ ID NO: 1032 - DNA, 2211 bp, Artificial Sequence
  source: /note="Description of Artificial Sequence: Synthetic polynucleotide"
atggctgccgatggttatcttccagattggctcgaggacaacctctctgagggcattcgcgagtggtgggacttgaaacctggagccccgaagcccaaagccaaccagcaaaagcaggacgacggccggggtctggtgcttcctggctacaagtacctcggacccttcaacggactcgacaagggggagcccgtcaacgcggcggacgcagcggccctcgagcacgacaaggcctacgaccagcagctcaaagcgggtgacaatccgtacctgcggtataaccacgccgacgccgagtttcaggagcgtctgcaagaagatacgtcttttgggggcaacctcggacgagcagtcttccaggccaaaaagaggcttcttgaacctcttggtctggttgaggaagcggctaagacggctcctggaaagaagaggcctgtagagcagtctcctcaggaaccggactcctccgcgggtattggcaaatcgggtgcacagcccgctaaaaagagactcaatttcggtcagactggcgacacagagtcagtcccagaccctcaaccaatcggagaacctccagcagcgccctctggtgtgggacctaatacaatggctgcaggcggtggcgcaccaatggcagacaataacgaaggtgccgatggagtgggtagttcctcgggaaattggcattgcgattcccaatggctgggggacagagtcatcaccaccagcacccgaacctgggccctgcccacctataacaaccacctctacaagcaaatctccagtgcttcaacgggggccagcaacgacaaccactactttggctacagcaccccttgggggtattttgacttcaacagattccactgccacttttcaccacgtgactggcaaagactcatcaacaacaactggggattccgacccaagagactcaacttcaagctcttcaacatccaggtcaaggaggtcacgcagaatgaaggcaccaagaccatcgccaataacctcaccagcaccatccaggtgtttacggactcggagtaccagctgccgtacgttctcggctctgcccaccagggctgcctgcctccgttcccggcggacgtgttcatgattccccagtacggctacctaacactcaacaacggtagtcaggccgtgggacgctcctccttctactgcctggaatactttccttcgcagatgctgagaaccggcaacaacttccagtttacttacaccttcgaggacgtgcctttccacagcagctacgcgcacagccagagcttggaccggctgatgaatcctctgattgaccagtacctgtactacttgtctcggactcaaacaacaggaggcacggcaaatacgcagactctgggcttcagccaaggtgggcctaatacaatggccaatcacgcaaagaactggctgccaggaccctgttaccgccaacaacgcgtctcaacgacaaccgggcaaaacaacaatagcaactttgcctggactgctgggaccaaataccatctgaatggaagaaattcattggctaatcctggcatcgctatggcaacacacaaagacgacaaggagcgtttttttcccagtaacgggatcctgatttttggcaaacaaaatgctgccagagacaatgcggattacagcgatgtcatgctcaccagcgaggaagaaatcaaaaccactaaccctgtggctacagaggaatacggtatcgtggcagataacttgcagcagcaaaacacggctcctcaaattggaactgtcaacagccagggggccttacccggtatggtctggcagaaccgggacgtgtacctgcagggtcccatctgggccaagattcctcacacggacggcaacttccacccgtctccgctgatgggcggctttggcctgaaacatcctccgcctcagatcctgatcaagaacacgcctgtacctgcggatcctccgaccaccttcaaccagtcaaagctgaactctttcatcacgcaatacagcaccggacaggtcagcgtggaaattgaatgggagctgcagaaggaaaacagcaagcgctggaaccccgagatccagtacacctccaactactacaaatctacaagtgtggactttgctgttaatacagaaggcgtgtactctgaaccccaccccattggcacccgttacctcacccgtcccctgtaa

SEQ ID NO: 1033 - DNA, 2214 bp, Artificial Sequence
  source: /note="Description of Artificial Sequence: Synthetic polynucleotide"
atggctgccgatggttatcttccagattggctcgaggacaaccttagtgaaggaattcgcgagtggtgggcgctgaaacctggagccccgaagcccaaagccaaccagcaaaagcaggacgacggccggggtctggtgcttcctggctacaagtacctcggacccttcaacggactcgacaagggggagcccgtcaacgcggcggacgcagcggccctcgagcacgacaaggcctacgaccagcagctcaaagcgggtgacaatccgtacctgcggtataaccacgccgacgccgagtttcaggagcgtctgcaagaagatacgtcttttgggggcaacctcgggcgagcagtcttccaggccaagaagcgggttctcgaacctctcggtctggttgaggaaggcgctaagacggctcctggaaagaaacgtccggtagagcagtcgccacaagagccagactcctcctcgggcatcggcaagacaggccagcagcccgctaaaaagagactcaatttcggtcagactggcgacacagagtcagtcccagaccctcaaccaatcggagaacctcccgcagccccctcaggtgtgggatctcttacaatggcttcaggtggtggcgcaccagtggcagacaataacgaaggtgccgatggagtgggtagttcctcgggaaattggcattgcgattcccaatggctgggggacagagtcatcaccaccagcaccagaacctgggccttgcccacctacaataaccacctctacaagcaaatctccaacagcacatctggaggatcttcaaatgacaacgcctacttcggctacagcaccccctgggggtattttgactttaacagattccactgccacttttcaccacgtgactggcagcgactcatcaacaacaactggggattccgacccaagagactcaacttcaagctcttcaacatccaggtcaaggaggtcacgcagaacgaaggcaccaagaccatcgccaataacctcaccagcaccatccaggtgtttacggactcggagtaccagctgccgtacgttctcggctccgcccaccagggctgcctgcctccgttcccggcggacgtgttcatgattccccagtacggctacctaacgctcaacaacggtagtcaggccgtgggacgctcctccttctactgcctggaatactttccttcgcagatgctgagaaccggcaacaacttccagtttacttacaccttcgaggacgtgcctttccacagcagctacgcgcacagccagagcttggaccggctgatgaatcctctgattgaccagtacctgtactacttgtctcggactcaaacaacaggaggcacggcaaatacgcagactctgggcttcagccaaggtgggcctaatacaatggccaatcaggcaaagaactggctgccaggaccctgttaccgccaacaacgcgtctcaacgacaaccgggcaaaacaacaatagcaactttgcctggactgctgggaccaaataccatctgaatggaagaaattcattggctaatcctggcatcgctatggcaacacacaaagacgacaaggagcgtttttttcccagtaacgggatcctgatttttggcaaacaaaatgctgccagagacaatgcggattacagcgatgtcatgctcaccagcgaggaagaaatcaaaaccactaaccctgtggctacagaggaatacggtatcgtggcagataacttgcagcagcaaaacacggctcctcaaattggaactgtcaacagccagggggccttacccggtatggtctggcagaaccgggacgtgtacctgcagggtcccatctgggccaagattcctcacacggacggcaacttccacccgtctccgctgatgggcggctttggcctgaaacatcctccgcctcagatcctgatcaagaacacgcctgtacctgcggatcctccgaccaccttcaaccagtcaaagctgaactctttcatcacgcaatacagcaccggacaggtcagcgtggaaattgaatgggagctgcagaaggaaaacagcaagcgctggaaccccgagatccagtacacctccaactactacaaatctacaagtgtggactttgctgttaatacagaaggcgtgtactctgaaccccaccccattggcacccgttacctcacccgtcccctgtaa

SEQ ID NO: 1034 - DNA, 2214 bp, Artificial Sequence
  source: /note="Description of Artificial Sequence: Synthetic polynucleotide"
atggctgccgatggttatcttccagattggctcgaggacaaccttagtgaaggaattcgcgagtggtgggcgctgaaacctggagccccgaagcccaaagccaaccagcaaaagcaggacgacggccggggtctggtgcttcctggctacaagtacctcggacccttcaacggactcgacaagggggagcccgtcaacgcggcggacgcagcggccctcgagcacgacaaggcctacgaccagcagctcaaagcgggtgacaatccgtacctgcggtataaccacgccgacgcggagtttcaggagcgccttaaagaagatacgtcttttgggggcaacctcgggcgagcagtcttccaggccaagaagagggttctcgaaccttttggtctggttgaggaaggtgctaagacggctcctggaaagaaacgtccggtagagcagtcgccacaagagccagactcctcctcgggcatcggcaagacaggccagcagcccgctaaaaagagactcaattttggtcagactggcgactcagagtcagttccagaccctcaacctctcggagaacctccagcagcgccctctggtgtgggacctaatacaatggctgcaggcggtggcgcaccaatggcagacaataacgaaggtgccgatggagtgggtagttcctcgggaaattggcattgcgattcccaatggctggggaacagagtcatcaccaccagcacccgaacctgggccctgcccacctacaacaatcacctctacaagcaaatctccaacagcacatctggaggatcttcaaatgacaacgcctacttcggctacagcaccccctgggggtattttgacttcaacagattccactgccacttctcaccacgtgactggcagcgactcatcaacaacaactggggattccggcccaagagactcaacttcaagctcttcaacattcaggtcaaagaggttacggacaacaatggagtcaagaccatcgccaataaccttaccagcacggtccaggtcttcacggactcggagtaccagttgccgtacgtcctcggctctgcgcaccagggctgcctccctccgttcccggcggacgtgttcatgattccgcaatacggctacctgacgctcaacaacggtagccaagccgtgggacgttcatccttttactgcctggaatatttcccttctcagatgctgagaaccggcaacaacttccagtttacttacaccttcgaggacgtgcctttccacagcagctacgcgcacagccagagcttggaccggctgatgaatcctctgattgaccagtacctgtactacttgtctcggactcaaacaacaggaggcacggcaaatacgcagactctgggcttcagccaaggtgggcctaatacaatggccaatcaggcaaagaactggctgccaggaccctgttaccgccaacaacgcgtctcaacgacaaccgggcaaaacaacaatagcaactttgcctggactgctgggaccaaataccatctgaatggaagaaattcattggctaatcctggcatcgctatggcaacacacaaagacgacaaggagcgtttttttcccagtaacgggatcctgatttttggcaaacaaaatgctgccagagacaatgcggattacagcgatgtcatgctcaccagcgaggaagaaatcaaaaccactaaccctgtggctacagaggaatacggtatcgtggcagataacttgcagcagcaaaacacggctcctcaaattggaactgtcaacagccagggggccttacccggtatggtctggcagaaccgggacgtgtacctgcagggtcccatctgggccaagattcctcacacggacggcaacttccacccgtctccgctgatgggcggctttggcctgaaacatcctccgcctcagatcctgatcaagaacacgcctgtacctgcggatcctccgaccaccttcaaccagtcaaagctgaactctttcatcacgcaatacagcaccggacaggtcagcgtggaaattgaatgggagctgcagaaggaaaacagcaagcgctggaaccccgagatccagtacacctccaactactacaaatctacaagtgtggactttgctgttaatacagaaggcgtgtactctgaaccccaccccattggcacccgttacctcacccgtcccctgtaa

SEQ ID NO: 1035 - DNA, 2211 bp, Artificial Sequence
  source: /note="Description of Artificial Sequence: Synthetic polynucleotide"
atggctgccgatggttatcttccagattggctcgaggacaacctctctgagggcattcgcgagtggtgggacttgaaacctggagccccgaagcccaaagccaaccagcaaaagcaggacgacggccggggtctggtgcttcctggctacaagtacctcggacccttcaacggactcgacaggggggagcccgtcaacgcggcggacgcagcggccctcgagcacgacaaggcctacgaccagcagctcaaagcgggtgacaatccgtacctgcggtataaccacgccgacgccgagtttcaggagcgtctgcaagaagatacgtcttttgggggcaacctcgggcgagcagtcttccaggccaagaagcgggttctcgaacctctcggtctggttgaggaaggcgctaagacggctcctggaaagaaacgtccggtagagcagtcgccacaagagccagactcctcctcgggcatcggcaagacaggccagcagcccgctaaaaagagactcaattttggtcagactggcgactcagagtcagtccccgacccacaacctctcggagaacctccagcaacccccgctgctgtgggacctactacaatggcttcaggcggtggcgcaccaatggcagacaataacgaaggcgccgacggagtgggtaatgcctcaggaaattggcattgcgattccacatggctgggcgacagagtcatcaccaccagcacccgaacctgggccttgcccacctataacaaccacctctacaagcaaatctccagtgcttcaacgggggccagcaacgacaaccactacttcggctacagcaccccctgggggtattttgacttcaacagattccactgccacttctcaccacgtgactggcagcgactcatcaacaacaactggggattccggcctaagcgactcaacttcaagctcttcaacattcaggtcaaagaggttacggacaacaatggagtcaagaccatcgccaataacctcaccagcaccatccaggtgtttacggactcggagtaccagctgccgtacgttctcggctctgcccaccagggctgcctgcctccgttcccggcggacgtgttcatgattccccagtacggctacctaacactcaacaacggtagtcaggccgtgggacgctcctccttctactgcctggaatactttccttcgcagatgctgagaaccggcaacaacttccagtttacttacaccttcgaggacgtgcctttccacagcagctacgcccacagccagagcttggaccggctgatgaatcctctgattgaccagtacctgtactacttgtctcggactcaaacaacaggaggcacggcaaatacgcagactctgggcttcagccaaggtgggcctaatacaatggccaatcaggcaaagaactggctgccaggaccctgttaccgccaacaacgcgtctcaacgacaaccgggcaaaacaacaatagcaactttgcctggactgctgggaccaaataccatctgaatggaagaaattcattggctaatcctggcatcgctatggcaacacacaaagacgacaaggagcgtttttttcccagtaacgggatcctgatttttggcaaacaaaatgctgccagagacaatgcggattacagcgatgtcatgctcaccagcgaggaagaaatcaaaaccactaaccctgtggctacagaggaatacggtatcgtggcagataacttgcagcagcaaaacacggctcctcaaattggaactgtcaacagccagggggccttacccggtatggtctggcagaaccgggacgtgtacctgcagggtcccatctgggccaagattcctcacacggacggcaacttccacccgtctccgctgatgggcggctttggcctgaaacatcctccgcctcagatcctgatcaagaacacgcctgtacctgcggatcctccgaccaccttcaaccagtcaaagctgaactctttcatcacgcaatacagcaccggacaggtcagcgtggaaattgaatgggagctgcagaaggaaaacagcaagcgctggaaccccgagatccagtacacctccaactactacaaatctacaagtgtggactttgctgttaatacagaaggcgtgtactctgaaccccaccccattggcacccgttacctcacccgtcccctgtaa

SEQ ID NO: 1036 - DNA, 2211 bp, Artificial Sequence
  source: /note="Description of Artificial Sequence: Synthetic polynucleotide"
atggctgccgatggttatcttccagattggctcgaggacaacctctctgagggcattcgcgagtggtgggacttgaaacctggagccccgaagcccaaagccaaccagcaaaagcaggacgacggccggggtctggtgcttcctggctacaagtacctcggacccttcaacggactcgacaagggggagcccgtcaacgcggcggacgcagcggccctcgagcacgacaaggcctacgaccagcagctcaaagcgggtgacaatccgtacctgcggtataaccacgccgacgccgagtttcaggagcgtctgcaagaagatacgtcttttgggggcaacctcgggcgagcagtcttccaggccaagaagcgggttctcgaacctctcggtctggttgaggaaggcgctaagacggctcctggaaagaaacgtccggtagagcagtcgccacaagagccagactcctcctcgggcatcggcaagaaaggccaacagcccgccagaaaaagactcaattttggtcagactggcgactcagagtcagttccagaccctcaacctctcggagaacctcccgcagccccctcaggtgtgggatctcttacaatggcttcaggcggtggcgcaccaatggcagacaataacgaaggcgccgacggagtgggtaatgcctcaggaaattggcattgcgattccacatggctgggcgacagagtcatcaccaccagcacccgaacatgggccttgcccacttacaacaaccatctctacaagcaaatctccagtgcttcaacgggggccagcaacgacaaccactacttcggctacagcaccccctgggggtattttgatttcaacagattccactgccacttttcaccacgtgactggcaaagactcatcaacaacaactggggattccgacccaagagactcaacttcaagctctttaacattcaagtcaaagaggtcacgcagaatgaaggcaccaagaccatcgccaataaccttaccagcacggtccaggtcttcacggactcagactatcagctcccgtacgttctcggctccgcccaccagggctgcctgcctccgttcccggcggacgtgttcatgattccccagtacggctacctaacactcaacaacggtagtcaggccgtgggacgctcctccttctactgcctggaatactttccttcgcagatgctgagaaccggcaacaacttccagtttacttacacctttgaggacgttcctttccacagcagctacgctcacagccagagtctggaccgtctcatgaatcctctgattgaccagtacctgtactacttgtctcggactcaaacaacaggaggcacggcaaatacgcagactctgggcttcagccaaggtgggcctaatacaatggccaatcaggcaaagaactggctgccaggaccctgttaccgccaacaacgcgtctcaacgacaaccgggcaaaacaacaatagcaactttgcctggactgctggaaccaaataccatctgaatggaagaaattcattgtctaatcctggcatcgctatggcgacacacaaagacgacaaggagcgtttttttcccagtaacgggatcctgatttttggcaaacaaaatgctgccagagacaatgcggattacagcgatgtcatgctcaccagcgaggaagaaatcaaaaccactaaccctgtggctacagaggaatacggtatcgtggcagataacttgcagcagcaaaacacggctcctcaaattggaactgtcaacagccagggggccttacccggtatggtctggcagaaccgggacatgtacctgcagggtcccatctgggccaagattcctcacacggacggcaacttccacccgtctccgctgatgggcggctttggcctgaaacatcctccgcctcagatcctgatcaagaacacgcctgtacctgcggatcctccgaccaccttcaaccagtcaaagctgaactctttcatcacgcaatacagcaccggacaggtcagcgtggaaattgaatgggagctgcagaaggaaaacagcaagcgctggaaccccgagatccagtacacctccaactactacaaatctacaagtgtggactttgctgttaatacagaaggcgtgtactctgaaccccaccccattggcacccgttacctcacccgtcccctgtaa

SEQ ID NO: 1037 - DNA, 2211 bp, Artificial Sequence
  source: /note="Description of Artificial Sequence: Synthetic polynucleotide"
atggctgccgatggttatcttccagattggctcgaggacaacctctctgagggcattcgcgagtggtgggcgctgaaacctggagccccgaagcccaaagccaaccagcaaaagcaggacgacggccggggtctggtgcttcctggctacaagtacctcggacccttcaacggactcgacaagggggagcccgtcaacgcggcggatgcagcggccctcgagcacgacaaggcctacgaccagcagctcaaagcgggtgacaatccgtacctgcggtataaccacgccgacgccgagtttcaggagcgtctgcaggaagatacgtcttttgggggcaacctcgggcgagcagtcttccaggccaagaagagggttctcgaaccttttggtctggttgaggaaggcgctaagacggctcctggaaagaaacgtccggtagagcagtcgccacaagagccagactcctcctcgggcatcggcaagacaggccagcagcccgctaaaaagagactcaattttggtcagactggcggctcagagtcagtccccgacccacaacctctcggagaacctccagcaacccccgctgctgtgggacctactacaatggctgcaggcggtggcgcaccaatggcagacaataacgaaggcgccgacggagtgggtagttcctcgggaaattggcattgcgattccacatggctgggcgacagagtcatcaccaccagcaccagaacctgggccttgcccacctataacaaccacctctacaagcaaatctccagtgcttcaacgggggccagcaacgacaaccactacttcggctacagcaccccctgggggtattttgatttcaacagattccactgccatttctcaccacgtgactggcagcgactcatcaacaacaactggggattccggcccaagagactcaacttcaaactcttcaacattcaggtcaaagaggttacggacaacaatggagtcaagaccatcgccaataaccttaccagcacggtccaggtgtttacggactcggagtaccagctgccgtacgttctcggctctgcccaccagggctgcctccctccgttcccggcggacgtgttcatgattccgcagtacggctacctaacgctcaacaatggcagccaggcagtgggacggtcatccttttactgcctggaatatttcccttctcagatgctgagaacgggcaacaactttaccttcagctacacctttgaggaagtgcctttccacagcagctacgcgcacagccagagcctggaccggctgatgaatcctctgattgaccagtacctgtactacttgtctcggactcaaacaacaggaggcacggcaaatacgcagactctgggcttcagccaaggtgggcctaatacaatggccaatcaggcaaagaactggctgccaggaccctgttaccgccaacaacgcgtctcaacgacaaccgggcaaaacaacaatagcaactttgcctggactgctgggaccaaataccatctgaatggaagaaattcattggctaatcctggcatcgctatggcctcacacaaagacgacaaggagcgtttttttcccagtaacgggatcctgatttttggcaaacaaaatgctgccagagacaatgcggattacagcgatgtcatgctcaccagcgaggaagaaatcaaaaccactaaccctgtggctacagaggaatacggtatcgtggcagataacttgcagcagcaaaacacggctcctcaaattggaactgtcaacagccagggggccttacccggtatggtctggcagaaccgggacgtgtacctgcagggtcccatctgggccaagattcctcacacggacggcaacttccacccgtctccgctgatgggcggctttggcctgaaacatcctccgcctcagatcctgatcaagaacacgcctgtacctgcggatcctccgaccaccttcaaccagtcaaagctgaactctttcatcacgcaatacagcaccggacaggtcagcgtggaaattgaatgggagctgcagaaggaaaacagcaagcgctggaaccccgagatccagtacacctccaactactacaaatctacaagtgtggactttgctgttaatacagaaggcgtgtactctgaaccccaccccattggcacccgttacctcacccgtcccctgtaa

SEQ ID NO: 1038 - protein, 736 aa, Artificial Sequence
  source: /note="Description of Artificial Sequence: Synthetic polypeptide"
MAADGYLPDWLEDTLSEGIRQWWKLKPGPPPPKPAERHKDDSRGLVLPGYKYLGPFNGLDKGEPVNEADAAALEHDKAYDQQLKAGDNPYLKYNHADAEFQERLKEDTSFGGNLGRAVFQAKKRVLEPLGLVEEGAKTAPGKKRPVEQSPQEPDSSSGIGKTGQQPAKKRLNFGQTGDSESVPDPQPLGEPPATPAAVGPTTMASGGGAPMADNNEGADGVGSSSGNWHCDSQWLGDRVITTSTRTWALPTYNNHLYKQISSASTGASNDNHYFGYSTPWGYFDFNRFHCHFSPRDWQRLINNNWGFRPKRLNFKLFNIQVKEVTQNEGTKTIANNLTSTIQVFTDSEYQLPYVLGSAHQGCLPPFPADVFMIPQYGYLTLNNGSQAVGRSSFYCLEYFPSQMLRTGNNFQFTYTFEDVPFHSSYAHSQSLDRLMNPLIDQYLYYLSRTQTTGGTANTQTLGFSQGGPNTMANQAKNWLPGPCYRQQRVSTTTGQNNNSNFAWTAGTKYHLNGRNSLANPGIAMATHKDDKERFFPSNGILIFGKQNAARDNADYSDVMLTSEEEIKTTNPVATEEYGIVADNLQQQNTAPQIGTVNSQGALPGMVWQNRDVYLQGPIWAKIPHTDGNFHPSPLMGGFGLKHPPPQILIKNTPVPADPPTTFNQSKLNSFITQYSTGQVSVEIEWELQKENSKRWNPEIQYTSNYYKSTSVDFAVNTEGVYSEPHPIGTRYLTRPL

SEQ ID NO: 1039 - protein, 736 aa, Artificial Sequence
  source: /note="Description of Artificial Sequence: Synthetic polypeptide"
MAADGYLPDWLEDNLSEGIREWWALKPGAPKPKANQQKQDDGRGLVLPGYKYLGPFNGLDKGEPVNAADAAALEHDKAYDQQLKAGDNPYLKYNHADAEFQERLKEDTSFGGNLGRAVFQAKKRLLEPLGLVEEAAKTAPGKKRPVEQSPQEPDSSAGIGKSGAQPAKKRLNFGQTGDSESVPDPQPLGEPPATPAAVGPTTMASGGGAPMADNNEGADGVGNASGNWHCDSTWLGDRVITTSTRTWALPTYNNHLYKQISSASTGASNDNHYFGYSTPWGYFDFNRFHCHFSPRDWQRLINNNWGFRPKRLNFKLFNIQVKEVTQNEGTKTIANNLTSTIQVFTDSEYQLPYVLGSAHQGCLPPFPADVFMIPQYGYLTLNNGSQAVGRSSFYCLEYFPSQMLRTGNNFQFTYTFEDVPFHSSYAHSQSLDRLMNPLIDQYLYYLSRTQTTGGTANTQTLGFSQGGPNTMANQAKNWLPGPCYRQQRVSTTTGQNNNSNFAWTAGTKYHLNGRNSLANPGIAMATHKDDKERFFPSNGILIFGKQNAARDNADYSDVMLTSEEEIKATNPVATEEYGIVADNLQQQNTAPQIGTVNSQGALPGMVWQNRDVYLQGPIWAKIPHTDGNFHPSPLMGGFGLKHPPPQILIKNTPVPADPPTTFNQSKLNSFITQYSTGQVSVEIEWELQKENSKRWNPEIQYTSNYYKSTSVDFAVNTEGVYSEPHPIGTRYLTRPL

SEQ ID NO: 1040 - protein, 737 aa, Artificial Sequence
  source: /note="Description of Artificial Sequence: Synthetic polypeptide"
MAADGYLPDWLEDNLSEGIREWWDLKPGAPKPKANQQKQDDGRGLVLPGYKYLGPFNGLDKGEPVNAADAAALEHDKAYDQQLKAGDNPYLRYNHADAEFQERLQEDTSFGGNLGRAVFQAKKRVLEPLGLVEEGANTAPGKKRPVEQSPQEPDSSAGIGKSGAQPAKKRLNFGQTGDTESVPDPQPIGEPPAAPSGVGSLTMASGGGAPVADNNEGADGVGSSSGNWHCDSQWLGDRVITTSTRTWALPTYNNHLYKQISNSTSGGSSNDNAYFGYSTPWGYFDFNRFHCHFSPRDWQRLINNNWGFRPKRLNFKLFNIQVKEVTDNNGVKTIANNLTSTIQVFTDSEYQLPYVLGSAHQGCLPPFPADVFMIPQYGYLTLNNGSQAVGRSSFYCLEYFPSQMLRTGNNFQFTYTFEDVPFHSSYAHSQSLDRLMNPLIDQYLYYLSRTQTTGGTANTQTLGFSQGGPNTMANQAKNWLPGPCYRQQRVSTTTGQNNNSNFAWTAGTKYHLNGRNSLANPGIAMASHKDDKERFFPSNGILIFGKQNAARDNADYSDVMLTSEEEIKTTNPVATEEYGIVADNLQQQNTAPQIGTVNSQGALPGMVWQNRDVYLQGPIWAKIPHTDGNFHPSPLMGGFGLKHPPPQILIKNTPVPADPPTTFNQSKLNSFITQYSTGQVSVEIEWELQKENSKRWNPEIQYTTNYYKSTSVDFAVNTEGVYSEPHPIGTRYLTRPL

SEQ ID NO: 1041 - protein, 736 aa, Artificial Sequence
  source: /note="Description of Artificial Sequence: Synthetic polypeptide"
MAADGYLPDWLEDNLSEGIREWWALKPGAPKPKANQQKQDDGRGLVLPGYKYLGPFNGLDKGEPVNEADAAALEHDKAYDQQLKAGDNPYLRYNHADAEFQERLQEDTSFGGNLGRAVFQAKKRVLEPLGLVEEGAKTAPGKKRPVEQSPQEPDSSSGIGKTGQQPAKKRLNFGQTGDSESVPDPQPLGEPPATPAAVGPTTMASGGGAPMADNNEGADGVGNASGNWHCDSTWLGDRVITTSTRTWALPTYNNHLYKQISSASTGASNDNHYFGYSTPWGYFDFNRFHCHFSPRDWQRLINNNWGFRPKRLNFKLFNIQVKEVTQNEGTKTIANNLTSTIQVFTDSEYQLPYVLGSAHQGCLPPFPADVFMIPQYGYLTLNNGSQAVGRSSFYCLEYFPSQMLRTGNNFQFTYTFEDVPFHSSYAHSQSLDRLMNPLIDQYLYYLSRTQTTGGTANTQTLGFSQGGPNTMANQAKNWLPGPCYRQQRVSTTTGQNNNSNFAWTAGTKYHLNGRNSLANPGIAMATHKDDKERFFPSNGILIFGKQNAARDNADYSDVMLTSEEEIKTTNPVATEEYGIVADNLQQQNTAPQIGTVNSQGALPGMVWQNRDVYLQGPIWAKIPHTDGNFHPSPLMGGFGLKHPPPQILIKNTPVPADPPTTFNQSKLNSFITQYSTGQVSVEIEWELQKENSKRWNPEIQYTSNYYKSTSVDFAVNTEGVYSEPHPIGTRYLTRPL

SEQ ID NO: 1042 - protein, 736 aa, Artificial Sequence
  source: /note="Description of Artificial Sequence: Synthetic polypeptide"
MAADGYLPDWLEDNLSEGIREWWALKPGAPKPKANQQKQDDGRGLVLPGYKYLGPFNGLDKGEPVNEADAAALEHDKAYDQQLKAGDNPYLRYNHADAEFQERLQEDTSFGGNLGRAVFQAKKRVLEPFGLVEEGAKTAPGKKRPVEQSPQEPDSSSGIGKTGQQPAKKRLNFGQTGDSESVPDPQPLGEPPATPAAVGPTTMASGGGAPMADNNEGADGVGNASGNWHCDSQWLGDRVITTSTRTWALPTYNNHLYKQISSASTGASNDNHYFGYSTPWGYFDFNRFHCHFSPRDWQRLINNNWGFRPKRLNFKLFNIQVKEVTDNNGVKTIANNLTSTVQVFSDSEYQLPYVLGSAHQGCLPPFPADVFMIPQYGYLTLNNGSQAVGRSSFYCLEYFPSQMLRTGNNFQFTYTFEDVPFHSSYAHSQSLDRLMNPLIDQYLYYLSRTQTTGGTANTQTLGFSQGGPNTMANQAKNWLPGPCYRQQRVSTTTGQNNNSNFAWTAGTKYHLNGRNSLANPGIAMATHKDDKERFFPSNGILIFGKQNAARDNADYSDVMLTSEEEIKTTNPVATEEYGIVADNLQQQNTAPQIGTVNSQGALPGMVWQNRDVYLQGPIWAKIPHTDGNFHPSPLMGGFGLKHPPPQILIKNTPVPADPPTTFNQSKLNSFITQYSTGQVSVEIEWELQKENSKRWNPEIQYTSNYYKSTSVDFAVNTEGVYSEPHPIGTRYLTRPL

SEQ ID NO: 1043 - protein, 736 aa, Artificial Sequence
  source: /note="Description of Artificial Sequence: Synthetic polypeptide"
MAADGYLPDWLEDTLSEGIRQWWKLKPGPPPPKPAERHKDDSRGLVLPGYKYLGPFNGLDKGEPVNEADAAALEHDKAYDRQLDSGDNPYLKYNHADAEFQERLKEDTSFGGNLGRAVFQAKKRVLEPFGLVEEGAKTAPGKKRPVEQSPQEPDSSSGIGKTGQQPAKKRLNFGQTGDSESVPDPQPLGEPPATPAAVGPTTMASGGGAPMADNNEGADGVGNASGNWHCDSTWLGDRVITTSTRTWALPTYNNHLYKQISSASTGASNDNHYFGYSTPWGYFDFNRFHCHFSPRDWQRLINNNWGFRPKRLNFKLFNIQVKEVTDNNGVKTIANNLTSTVQVFTDSDYQLPYVLGSAHEGCLPPFPADVFMIPQYGYLTLNNGSQAVGRSSFYCLEYFPSQMLRTGNNFQFTYTFEDVPFHSSYAHSQSLDRLMNPLIDQYLYYLSRTQTTGGTANTQTLGFSQGGPNTMANQAKNWLPGPCYRQQRVSTTTGQNNNSNFAWTAGTKYHLNGRNSLANPGIAMATHKDDKERFFPSNGILIFGKQNAARDNADYSDVMLTSEEEIKTTNPVATEEYGIVADNLQQQNTAPQIGTVNSQGALPGMVWQNRDVYLQGPIWAKIPHTDGNFHPSPLMGGFGLKHPPPQILIKNTPVPADPPTTFNQSKLNSFITQYSTGQVSVEIEWELQKENSKRWNPEIQYTSNYYKSTSVDFAVNTEGVYSEPHPIGTRYLTRNL

SEQ ID NO: 1044 - protein, 738 aa, Artificial Sequence
  source: /note="Description of Artificial Sequence: Synthetic polypeptide"
MAADGYLPDWLEDNLSEGIREWWDLKPGAPKPKANQQKQDDGRGLVLPGYKYLGPFNGLDKGEPVNAADAAALEHDKAYDQQLQAGDNPYLRYNHADAEFQERLQEDTSFGGNLGRAVFQAKKRVLEPLGLVEEGAKTAPGKKRPVEPSPQRSPDSSTGIGKKGQQPARKRLNFGQTGDSESVPDPQPLGEPPAAPSGVGPNTMAAGGGAPMADNNEGADGVGSSSGNWHCDSQWLGDRVITTSTRTWALPTYNNHLYKQISNSTSGGSSNDNAYFGYSTPWGYFDFNRFHCHFSPRDWQRLINNNWGFRPKRLSFKLFNIQVKEVTQNEGTKTIANNLTSTIQVFTDSEYQLPYVLGSAHQGCLPPFPADVFMIPQYGYLTLNNGSQAVGRSSFYCLEYFPSQMLRTGNNFTFSYTFEDVPFHSSYAHSQSLDRLMNPLIDQYLYYLSRTQTTGGTANTQTLGFSQGGPNTMANQAKNWLPGPCYRQQRVSTTTGQNNNSNFAWTAGTKYHLNGRNSLANPGIAMATHKDDKERFFPSNGILIFGKQNAARDNADYSDVMLTSEEEIKTTNPVATEEYGIVADNLQQQNTAPQIGTVNSQGALPGMVWQNRDVYLQGPIWAKIPHTDGNFHPSPLMGGFGLKHPPPQILIKNTPVPADPPTTFNQSKLNSFITQYSTGQVSVEIEWELQKENSKRWNPEIQYTSNYYKSTSVDFAVNTEGVYSEPHPIGTRYLTRPL

SEQ ID NO: 1045 - protein, 737 aa, Artificial Sequence
  source: /note="Description of Artificial Sequence: Synthetic polypeptide"
MAADGYLPDWLEDNLSEGIREWWDLKPGAPKPKANQQKQDDGRGLVLPGYKYLGPFNGLDKGEPVNAADAAALEHDKAYDQQLKAGDNPYLRYNHADAEFQERLQEDTSFGGNLGRAVFQAKKRVLEPFGLVEEGAKTAPGKKRPVEQSPQEPDSSSGIGKTGQQPAKKRLNFGQTGDSESVPDPQPLGEPPATPAAVGPTTMASGGGAPMQDNNEGADGVGSSSGNWHCDSTWLGDRVITTSTRTWALPTYNNHLYKQISNGTSGGATNDNTYFGYSTPWGYFDFNRFHCHFSPRDWQRLINNNWGFRPKRLNFKLFNIQVKEVTQNEGTKTIANNLTSTIQVFTDSEYQLPYVLGSAHQGCLPPFPADVFMIPQYGYLTLNNGSQAVGRSSFYCLEYFPSQMLRTGNNFTFSYTFEDVPFHSSYAHSQSLDRLMNPLIDQYLYYLSRTQTTGGTANTQTLGFSQGGPNTMANQAKNWLPGPCYRQQRVSTTTGQNNNSNFAWTAGTKYHLNGRNSLANPGIAMATHKDDKERFFPSNGILIFGKQNAARDNADYSDVMLTSEEEIKTTNPVATEEYGIVADNLQQQNTAPQIGTVNSQGALPGMVWQNRDVYLQGPIWAKIPHTDGNFHPSPLMGGFGLKHPPPQILIKNTPVPADPPTTFNQSKLNSFITQYSTGQVSVEIEWELQKENSKRWNPEIQYTSNYYKSTSVDFAVNTEGVYSEPHPIGTRYLTRPL

SEQ ID NO: 1046 - protein, 736 aa, Artificial Sequence
  source: /note="Description of Artificial Sequence: Synthetic polypeptide"
MAADGYLPDWLEDNLSEGIREWWALKPGAPKPKANQQKQDDGRGLVLPGYKYLGPFNGLDKGEPVNAADAAALEHDKAYDQQLKAGDNPYLRYNHADAEFQERLQEDTSFGGNLGRAVFQAKKRVLEPLGLVEEGAKTAPGKKRPVEQSPQEPDSSSGIGKTGQQPAKKRLNFGQTGDSESVPDPQPLGEPPATPAAVGPTTMASGGGAPMADNNEGADGVGSSSGNWHCDSTWLGDRVITTSTRTWALPTYNNHLYKQISSASTGASNDNHYFGYSTPWGYFDFNRFHCHFSPRDWQRLINNNWGFRPKRLNFKLFNIQVKEVTDNNGVKTIANNLTSTVQVFTDSDYQLPYVLGSAHEGCLPPFPADVFMIPQYGYLTLNNGSQAVGRSSFYCLEYFPSQMLRTGNNFTFSYTFEDVPFHSSYAHSQSLDRLMNPLIDQYLYYLSRTQTTGGTANTQTLGFSQGGPNTMANQAKNWLPGPCYRQQRVSTTTGQNNNSNFAWTAGTKYHLNGRNSLANPGIAMATHKDDKERFFPSNGILIFGKQNAARDNADYSDVMLTSEEEIKTTNPVATEEYGIVADNLQQQNTAPQIGTVNSQGALPGMVWQNRDVYLQGPIWAKIPHTDGNFHPSPLMGGFGLKHPPPQILIKNTPVPADPPTTFNQSKLNSFITQYSTGQVSVEIEWELQKENSKRWNPEIQYTSNYYKSTSVDFAVNTEGVYSEPHPIGTRYLTRPL

SEQ ID NO: 1047 - protein, 737 aa, Artificial Sequence
  source: /note="Description of Artificial Sequence: Synthetic polypeptide"
MAADGYLPDWLEDNLSEGIREWWDLKPGAPKPKANQQKQDDGRGLVLPGYKYLGPFNGLDKGEPVNAADAAALEHDKAYDQQLKAGDNPYLRYNHADAEFQERLQEDTSFGGNLGRAVFQAKKRVLEPLGLVEEGAKTAPGKKRPVEPSPQRSPDSSTGIGKKGQQPARKRLNFGQTGDSESVPDPQPLGEPPATPAAVGPTTMASGGGAPMADNNEGADGVGNASGNWHCDSTWLGDRVITTSTRTWALPTYNNHLYKQISSASTGASNDNHYFGYSTPWGYFDFNRFHCHFSPRDWQRLINNNLGSRPKRLNFKLFIIQVKEVTTNDGVTTIANNLTSTVQVFSDSEYQLPYVLGSAHQGCLPPFPADVFMIPQYGYLTLNNGSQAVGRSSFYCLEYFPSQMLRTGNNFTFSYTFEDVPFHSSYAHSQSLDRLMNPLIDQYLYYLNRTQNQSGSAQNKDLLFSRGSPAGMSVQPKNWLPGPCYRQQRVSKTKTDNNNSNFTWTGASKYNLNGRESIINPGTAMASHKDDKDKFFPMSGVMIFGKESAGASNTALDNVMITDEEEIKATNPVATERFGTVAVNLQSSSTDPATGDVHVMGALPGMVWQDRDVYLQGPIWAKIPHTDGHFHPSPLMGGFGLKHPPPQILIKNTPVPANPPAEFSATKFASFITQYSTGQVSVEIEWELQKENSKRWNPEVQYTSNYAKSANVDFTVDNNGLYTEPRPIGTRYLTRPL

SEQ ID NO: 1048 - protein, 736 aa, Artificial Sequence
  source: /note="Description of Artificial Sequence: Synthetic polypeptide"
MAADGYLPDWLEDNLSEGIREWWALKPGAPKPKANQQKQDDGRGLVLPGYKYLGPFNGLDKGEPVNAADAAALEHDKAYDQQLKAGDNPYLRYNHADAEFQERLQEDTSFGGNLGRAVFQAKKRLLEPLGLVEEAAKTAPGKKRPVEQSPQEPDSSSGIGKTGQQPAKKRLNFGQTGDSESVPDPQPIGEPPATPAAVGPTTMASGGGAPMADNNEGADGVGNSSGNWHCDSTWLGDRVITTSTRTWALPTYNNHLYKQISSASTGASNDNHYFGYSTPWGYFDFNRFHCHFSPRDWQRLINNNWGFRPKRLNFKLFNIQVKEVTQNEGTKTIANNLTSTIQVFTDSEYQLPYVLGSAHQGCLPPFPADVFMIPQYGYLTLNNGSQAVGRSSFYCLEYFPSQMLRTGNNFTFSYTFEDVPFHSSYAHSQSLDRLMNPLIDQYLYYLSRTQTTGGTANTQTLGFSQGGPNTMANQAKNWLPGPCYRQQRVSTTTGQNNNSNFAWTAGTKYHLNGRNSLANPGIAMATHKDDKERFFPSNGILIFGKQNAARDNADYSDVMLTSEEEIKTTNPVATEEYGIVADNLQQQNTAPQIGTVNSQGALPGMVWQNRDVYLQGPIWAKIPHTDGNFHPSPLMGGFGLKHPPPQILIKNTPVPADPPTTFNQSKLNSFITQYSTGQVSVEIEWELQKENSKRWNPEIQYTSNYYKSTSVDFAVNTEGVYSDPHPIGTRYLTRPL

SEQ ID NO: 1049 - protein, 736 aa, Artificial Sequence
  source: /note="Description of Artificial Sequence: Synthetic polypeptide"
MAADGYLPDWLEDNLSEGIREWWALKPGAPKPKANQQEQDDGRGLVLPGYKYLGPFNGLDKGEPVNAADAAALEHDKAYDQQLKAGDNPYLRYNHADAEFQERLQEDTSFGGNLGRAVFQAKKRVLEPFGLVEEGAKTAPGKKRPVEQSPQEPDSSSGIGKTGQQPAKKRLNFGQTGDSESVPDPQPLGEPPAAPSGVGPNTMAAGGGAPMADNNEGADGVGSSSGNWHCDSTWLGDRVITTSTRTWALPTYNNHLYKQISSASTGASNDNHYFGYSTPWGYFDFNRFHCHFSPRDWQRLINNNWGFRPKRLNFKLFNIQVKEVTQNEGTKTIANNLTSTIQVFTDSEYQLPYVLGSAHQGCLPPFPADVFMIPQYGYLTLNNGSQAVGRSSFFCLEYFPSQMLRTGNNFTFSYTFEDVPFHSSYAHSQSLDRLMNPLIDQYLYYLSRTQTTGGTANTQTLGFSQGGPNTMANQAKNWLPGPCYRQQRVSTTTGQNNNSNFAWTAGTKYHLNGRNSLANPGIAMATHKDDKERFFPSNGILIFGKQNAARDNADYSDVMLTSEEEIKTTNPVATEEYGIVADNLQQQNTAPQIGTVNSQGALPGMVWQNRDVYLQGPIWAKIPHTDGNFHPSPLMGGFGLKHPPPQILIKNTPVPADPPTTFNQSKLNSFITQYSTGQVSVEIEWELQKENSKRWNPEIQYTSNYYKSTSVDFAVNTEGVYSEPHPIGTRYLTRPL

SEQ ID NO: 1050 - protein, 736 aa, Artificial Sequence
  source: /note="Description of Artificial Sequence: Synthetic polypeptide"
MAADGYLPDWLEDNLSEGIREWWDLKPGAPKPKANQQKQDDGRGLVLPGYKYLGPFNGLDKGEPVNAADAAALEHDKAYDQQLKAGDNPYLRYNHADAEFQERLQEDTSFGGNLGRAVFQAKKRVLEPLGLVEEGAKTAPGKKRPVEQSPQEPDSSSGIGKTGQQPAKKRLNFGQTGDSESVPDPQPLGEPPATPAAVGPTTMASGGGAPMADNNEGADGVGNASGNWHCDSTWLGDRVITTSTRTWALPTYNNHLYKQISSASTGASNDNHYFGYSTPWGYFDFNRFHCHFSPRDWQRLINNNWGFRPKRLNFKLFNIQVKEVTTNDGVTTIANNLTSTVQVFSDSEYQLPYVLGSAHQGCLPPFPADVFMIPQYGYLTLNNGSQAVGRSSFYCLEYFPSQMLRTGNNFTFSYTFEDVPFHSSYAHSQSLDRLMNPLIDQYLYYLNRTQNQSGSAQNKDLLFSRGSPAGMSVQPKNWLPGPCYRQQRVSKTKTDNNNSNFTWTGASKYNLNGRESIINPGTAMASHKDDKDKFFPMSGVMIFGKESAGASNTALDNVMITDEEEIKATNPVATERFGTVAVNLQNSSTDPATGDVHVMGALPGMVWQDRDVYLQGPIWAKIPHTDGHFHPSPLMGGFGLKHPPPQILIKNTPVPANPPAEFSATKFASFITQYSTGQVSVEIEWELQKENSKRWNPEVQYTSNYAKSANVDFTVDNNGLYTVPRPIGTRYLTRPL

SEQ ID NO: 1051 - protein, 736 aa, Artificial Sequence
  source: /note="Description of Artificial Sequence: Synthetic polypeptide"
MAADGYLPDWLEDNLSEGIREWWALKPGAPKPKANQQKQDDGRGLVLPGYKYLGPFNGLDKGEPVNAADAAALEHDKAYDQQLKAGDNPYLRYNHADAEFQERLQEDTSFGGNLGRAVFQAKKRLLEPLGLVEEGAKTAPGKKRPVEQSPQEPDSSSGIGKTGEQPAKKRLNFGQTGDSESVPDPQPLGEPPATPAAVGPTTMASGGGAPMADNNEGADGVGSASGNWHCDSTWLGDRVITTSTRTWALPTYNNHLYKQISSASTGASNDNHYFGYSTPWGYFDFNRFHCHFSPRDWQRLINNNWGFRPKRLNFKLFNIQVKEVTDNNGVKTIANNLTSTIQVFTDSEYQLPYVLGSAHQGCLPPFPADVFMIPQYGYLTLNNGSQAVGRSSFYCLEYFPSQMLRTGNNFPFSYTFEDVPFHSSYAHSQSLDRLMNPLIDQYLYYLSRTQTTGGTANTQTLGFSQGGPNTMANQAKNWLPGPCYRQQRVSTTTGQNNNSNFAWTAGTKYHLNGRNSLANPGIAMATHKDDKERFFPSNGILIFGKQNAARDNADYSDVMLTSEEEIKTTNPVATEEYGIVADNLQQQNTAPQIGTVNSQGALPGMVWQNRDVYLQGPIWAKIPHTDGNFHPSPLMGGFGLKHPPPQILIKNTPVPADPPTTFNQSKLNSFITQYSTGQVSVEIEWELQKENSKRWNPEIQYTSNYYKSTSVDFAVNTEGVYSEPHPIGTRYLTRPL

SEQ ID NO: 1052 - protein, 736 aa, Artificial Sequence
  source: /note="Description of Artificial Sequence: Synthetic polypeptide"
MAADGYLPDWLEDNLSEGIREWWALKPGAPKPKANQQKQDDGRGLVLPGYKYLGPFNGLDKGEPVNAADAAALEHDKAYDQQLKAGDNPYLRYNHADAEFQERLQEDTSFGGNLGRAVFQAKKRVLEPLGLVEEGAKTAPGKKRPVEQSPQEPDSSSGIGKTGQQPAKKRLNFGQTGDSESVPDPQPLGEPPATPAAVGPTTMASGGGAPMADNNEGADGVGSSSGNWHCDSQWLGDRVITTSTRTWALPTYNNHLYKQISSASTGASNDNHYFGYSTPWGYFDFNRFHCHFSPRDWQRLINNNWGFRPKRLNFKLFNIQVKEVTDNNGVKTIANNLTSTVQVFTDSEYQLPYVLGSAHQDCLPPFPADVFMIPQYGYLTLNNGSQAVGRSSFYCLEYFPSQMLRTGNNFTFSYTFEDVPFHSSYAHSQSLDRLMNPLIDQYLYYLSRTQTTGGTANTQTLGFSQGGPNTMANQAKNWLPGPCYRQQRVSTTTGQNNNSNFAWTAGTKYHLNGRNSLANPGIAMATHKDDKERFFPSNGILIFGKQNAARDNADYSDVMLTSEEEIKTTNPVATEEYGIVADNLQQQNTAPQIGTVNSQGALPGMVWQNRDVYLQGPIWAKIPHTDGNFHPSPLMGGFGLKHPPPQILIKNTPVPADPPTTFNQSKLNSFITQYSTGQVSVEIEWELQKENSKRWNPEIQYTSNYYKSTSVDFAVNTEGVYSEPHPIGTRYLTRPL

SEQ ID NO: 1053 - protein, 735 aa, Artificial Sequence
  source: /note="Description of Artificial Sequence: Synthetic polypeptide"
MAADGYLPDWLEDNLSEGIREWWDLKPGAPKPKANQQKQDDGRGLVLPGYKYLGPFNGLDKGEPVNAADAAALEHDKAYDQQLKAGDNPYLRYNHADAEFQERLQEDTSFGGNLGRAVFQAKKRVLEPLGLVEEGAKTAPGKKRPVEQSPQEPDSSSGIGKTGQQPAKKRLNFGQTGDSESVPDPQPLGEPPATPAAVGPTTMASGGGAPMADNNEGADGVGNASGNWHCDSTWLGDVITTSTRTWALPTYNNHLYKQISSASTGASNDNHYFGYSTPWGYFDFNRFHCHFSPRDWQRLINNNWGFRPKRLNFKLFNIQVKEVTQNEGTKTIANNLTSTIQVFTDSEYQLPYVLGSAHQGCLPPFPADVFMIPQYGYLTLNNGSQAVGRSSFYCLEYFPSQMLRTGNNFQFTYTFEDVPFHSSYAHSQSLDRLMNPLIDQYLYYLSRTQTTGGTANTQTLGFSQGGPNTMANQAKNWLPGPCYRQQRVSTTTGQNNNSNFAWTAGTKYHLNGRNSLANPGIAMATHKDDKERFFPSNGILIFGKQNAARDNADYSDVILTSEEEIKTTNPVATEEYGIVADNLQQQNTAPQIGTVNSQGALPGMVWQNRDVYLQGPIWAKIPHTDGNFHPSPLMGGFGLKHPPPQILIKNTPVPADPPTTFNQSKLNSFITQYSTGQVSVEIEWELQKENSKRWNPEIQYTSNYYKSTSVDFAVNTEGVYSEPHPIGTRYLTRPL

SEQ ID NO: 1054 - protein, 736 aa, Artificial Sequence
  source: /note="Description of Artificial Sequence: Synthetic polypeptide"
MAADGYLPDWLEDTLSEGIRQWWKLKPGPPPPKPAERHKDDSRGLVLPGYKYLGPFNGLDKGEPVNEADAAALEHDKAYDRQLDSGDNPYLKYNHADAEFQERLKEDTSFGGNLGRAVFQAKKRVLEPFGLVEEGAKTAPGKKRPVEQSPQEPDSSSGIGKTGQQPAKKRLNFGQTGDSESVPDPQPLGEPPATPAAVGPTTMASGGGAPMADNNEGADGVGNASGNWHCDSTWLGDRVITTSTRTWALPTYNNHLYKQISSTSTGASNDNHYFGYSTPWGYFDFNRFHCHFSPRDWQRLINNNWGFRPKRLNFKLFNIQVKEVTDNNGVKTIANNLTSTVQVFTDSEYQLPYVLGSAHQGCLPPFPADVFMIPQYGYLTLNNGSQAVGRSSFYCLEYFPSQMLRTGNNFTFSYTFEDVPFHSSYAHSQSLDRLMNPLIDQYLYYLSRTQTTGGTANTQTLGFSQGGPNTMANQAKNWLPGPCYRQQRVSTTTGQNNNSNFAWTAGTKYHLNGRNSLANPGIAMATHKDDKERFFPSNGILIFGKQNAARDNADYSDVMLTSEEEIKTTNPVATEEYGIVADNLQQQNTAPQIGTVNSQGALPGMVWQNRDVYLQGPIWAKIPHTDGNFHPSPLMGGFGLKHPPPQILIKNTPVPADPPTTFNQSKLNSFITQYSTGQVSVEIEWELQKENSKRWNPEIQYTSNYYKSTSVDFAVNTEGVYSEPHPIGTRYLTRPL

SEQ ID NO: 1055 - protein, 735 aa, Artificial Sequence
  source: /note="Description of Artificial Sequence: Synthetic polypeptide"
MAADGYLPDWLEDNLSEGIREWWDLKPGAPKPKANQQKQDDGRGLVLPGYKYLGPFNGLDKGEPVNAADAAALEHDKAYDRQLDSGDNPYLRYNHADAEFQERLKEDTSFGGNLGRAVFQAKKRVLEPFGLVEEGAKTAPGKKRPVEQSPQEPDSSSGIGKTGQQPAKKRLNFGQTGDSESVPDPQPLGEPPATPAAVGPTTMASGGGAPMADNNEGADGVGNASGNWHCDSTWLGDRVITTSTRTWALPTYNNHLYKQISSASTGASNDNHYFGYSTPWGYFDFNRFHCHFSPRDWQRLINNNWGFRPKRLNFKLFNIQVKEVTQNEGTKTIANNLTSTIQVFTDSEYQLPYVLGSAHQGCLPPFPADVFMIPQYGYLTLNNGSQAVGRSSFYCLEYFPSQMLRTGNNFQFTYTFEDVPFHSSYAHSQSLDRLMNPLIDQYLYYLSRTQTTGGTANTQTLGFSQGGPNTMANQAKNWLPGPCYRQQRVSTTTGQNNNSNFAWTAGTKYHLNGRNSLANPGIAMATHKDDRSVFFQYRDPDFGKQNAARDNADYSDVMLTSEEEIKTTNPVATEEYGIVADNLQQQNTAPQIGTVNSQGALPGMVWQNRDVYLQGPIWAKIPHTDGNFHPSPLMGGFGLKHPPPQILIKNTPVPADPPTTFNQSKLNSFITQYSTGQVSVEIEWELQKENSKRWNPEIQYTSNYYKSTSVDFAVNTEGVYSEPHPIGTRYLTRPL

SEQ ID NO: 1056 - protein, 736 aa, Artificial Sequence
  source: /note="Description of Artificial Sequence: Synthetic polypeptide"
MAADGYLPDWLEDNLSEGIREWWALKPGAPKPKANQQKQDDGRGLVLPGYKYLGPFNGLDKGEPVNAADAAALEHDKAYDQQLKAGDNPYLKYNHADAEFQERLQGDTSFGGNLGRAVFQAKKRVLEPLGLVEEAAKTAPGKKRPVEQSPQEPDSSAGIGKSGAQPAKKRLNFGQTGDTESVPDPQPLGEPPAAPSGVGPNTMAAGGGAPMADNNEGADGVGSSSGNWHCDSQWLGDRVITTSTRTWALPTYNNHLYKQISSASTGASNDNHYFGYSTPWGYFDFNRFHCHFSPRDWQRLINNNWGFRPKRLNFKLFNIQVKEVTDNNGVKTIANNLTSTVQVFTDSDYQLPYVLGSAHEGCLPPFPADVFMIPQYGYLTLNNGSQAVGRSSFYCLEYFPSQMLRTGNNFQFTYTFEDVPFHSSYAHSQSLDRLMNPLIDQYLYYLSRTQTTGGTANTQTLGFSQGGPNTMANQAKNWLPGPCYRQQRVSTTTGQNNNSNFAWTAGTKYHLNGRNSLANPGIAMATHKDDKERFFPSNGILIFGKQNAARDNADYSDVMLTSEEEIKTTNPVATEEYGIVADNLQQQNTAPQIGTVNSQGALPGMVWQNRDVYLQGPIWAKIPHTDGNFHPSPLMGGFGLKHPPPQILIKNTPVPADPPTTFNQSKLNSFITQYSTGQVSVEIEWELQKENSKRWNPEIQYTSNYYKSTSVDFAVNTEGVYSEPHPIGTRYLTRPL

SEQ ID NO: 1057 - protein, 736 aa, Artificial Sequence
  source: /note="Description of Artificial Sequence: Synthetic polypeptide"
MAADGYLPDWLEDTLSEGIRQWWKLKPGPPPPKPAERHKDDSRGLVLPGYKYLGPFNGLDKGEPVNEADAAALEHDKAYDRQLDSGDNPYLKYNHADAEFQERLKEDTSFGGNLGRAVFQAKKRVLEPFGLVEEAAKTAPGKKRPVEQSPQEPDSSSGIGKTGQQPAKKRLNFGQTGDSESVPDPQPLGEPPATPAAVGPTTMASGGGAPMADNNEGADGVGNASGNWHCDSTWLGDRVITTSTRTWALPTYNNHLYKQISSASTGASNDNHYFGYSTPWGYFDFNRFHCHFSPRDWQRLINNNWGFRPKRLNFKLFNIQVKEVTDNNGVKTIANNLTSTVQVFTDSDYQLPYVLGSAHEGCLPPFPADVFMIPQYGYLTLNNGSQAVGRSSFYCLEYFPSQMLRTGNNFTFSYTFEDVPFHSSYAHSQSLDRLMNPLIDQYLYYLSRTQTTGGTANTQTLGFSQGGPNTMANQAKNWLPGPCYRQQRVSTTTGQNNNSNFAWTAGTKYHLNGRNSLANPGIAMATHKDDKERFFPSNGILIFGKQNAARDNADYSDVMLTSEEEIKTTNPVATEEYGIVADNLQQQNTAPQIGTVNSQGALPGMVWQNRDVYLQGPIWAKIPHTDGNFHPSPLMGGFGLKHPPPQILIKNTPVPADPPTTFNQSKLNSFITQYSTGQVSVEIEWELQKENSKRWNPEIQYTSNYYKSTSVDFAVNTEGVYSEPHPIGTRYLTRPL

SEQ ID NO: 1058 - protein, 736 aa, Artificial Sequence
  source: /note="Description of Artificial Sequence: Synthetic polypeptide"
MAADGYLPDWLEDNLSEGIREWWALKPGAPKPKANQQKQDDGRGLVLPGYKYLGPFNGLDKGEPVNAADAAALEHDKAYDQQLKAGDNPYLRYNHADAEFQERLQEDTSFGGNLGRAVFQAKKRVLEPLGLVEEGAKTAPGKKRPVEQSPQEPDSSSGIGKTGQQPAKKRLNFGQTGDSESVPDPQPLGEPPATPAAVGPTTMASGGGAPMADNNEGADGVGSSSGNWHCDSTWLGDRVITTSTRTWALPTYNNHLYKQISSASTGASNDNHYFGYSTPWGYFDFNRFHCHFSPRDWQRLINNNWGFRPKRLNFKLFNIQVKEVTDNNGVKTIANNLTSTVQVFTDSEYQLPYVLGSAHQGCLPPFPADVFMIPQYGYLTLNNGSQAVGRSSFYCLEYFPSQMLRTGNNFTFSYTFEDVPFHSSYAHSQSLDRLMNPLIDQYLYYLSRTQTTGGTANTQTLGFSQGGPNTMANQAKNWLPGPCYRQQRVSTTTGQNNNSNFAWTAGTKYHLNGRNSLANPGIAMATHKDDKERFFPSNGILIFGKQNAARDNADYSDVMLTSEEEIKTTNPVATEEYGIVADNLQQQNTAPQIGTVNSQGALPGMVWQNRDVYLQGPIWAKIPHTDGNFHPSPLMGGFGLKHPPPQILIKNTPVPADPPTTFNQSKLNSFITQYSTGQVSVEIEWELQKENSKRWNPEIQYTSNYYKSTSVDFAVNTEGVYSEPHPIGTRYLTRPL

SEQ ID NO: 1059 - protein, 737 aa, Artificial Sequence
  source: /note="Description of Artificial Sequence: Synthetic polypeptide"
MAADGYLPDWLEDNLSEGIREWWALKPGAPKPKANQQKQDDGRGLVLPGYKYLGPFNGLDKGEPVNAADAAALEHDKAYDQQLKAGDNPYLRYNHADAEFQERLQEDTSFGGNLGRAVFQAKKRVLEPLGLVEEGAKTAPGKKRPVEQSPQEPDSSSGIGKTGQQPAKKRLNFGQTGDTESVPDPQPIGEPPAAPSGVGSLTMASGGGAPVADNNEGADGVGSSSGNWHCDSQWLGDRVITTSTRTWALPTYNNHLYKQISNSTSGGSSNDNAYFGYSTPWGYFDFNRFHCHFSPRDWQRLINNNWGFRPKRLNFKLFNIQVKEVTQNEGTKTIANNLTSTIQVFTDSEYQLPYVLGSAHQGCLPPFPADVFMIPQYGYLTLNNGSQAVGRSSFYCLEYFPSQMLRTGNNFQFTYTFEDVPFHSSYAHSQSLDRLMNPLIDQYLYYLSRTQTTGGTANTQTLGFSQGGPNTMANQAKNWLPGPCYRQQRVSTTTGQNNNSNFAWTAGTKYHLNGRNSLANPGIAMATHKDDKERFFPSNGILIFGKQNAARDNADYSDVMLTSEEEIKTTNPVATEEYGIVADNLQQQNTAPQIGTVNSQGALPGMVWQNRDVYLQGPIWAKIPHTDGNFHPSPLMGGFGLKHPPPQILIKNTPVPADPPTTFNQSKLNSFITQYSTGQVSVEIEWELQKENSKRWNPEIQYTSNYYKSTSVDFAVNTEGVYSEPHPIGTRYLTRPL

SEQ ID NO: 1060 - protein, 736 aa, Artificial Sequence
  source: /note="Description of Artificial Sequence: Synthetic polypeptide"
MAADGYLPDWLEDNLSEGIREWWALKPGAPKPKANQQKQDDGRGLVLPGYKYLGPFNGLDKGEPVNAADAAALEHDKAYDQQLKAGDNPYLKYNHADAEFQERLQGDTSFGGNLGRAVFQAKKRVLEPLGLVEEAAKTAPGKKRPVEQSPQEPDSSAGIGKSGAQPAKKRLNFGQTGDTESVPDPQPLGEPPAAPSGVGPNTMAAGGGAPMADNNEGADGVGSSSGNWHCDSQWLGDRVITTSTRTWALPTYNNHLYKQISSASTGASNDNHYFGYSTPWGYFDFNRFHCHFSPRDWQRLINNNWGFRPKRLNFKLFNIQVKEVTDNNGVKTIANNLTSTVQVFTDSEYQLPYVLGSAHQGCLPPFPADVFMIPQYGYLTLNNGSQAVGRSSFYCLEYFPSQMLRTGNNFTFSYTFEDVPFHSSYAHSQSLDRLMNPLIDQYLYYLSRTQTTGGTANTQTLGFSQGGPNTMANQAKNWLPGPCYRQQRVSTTTGQNNNSNFAWTAGTKYHLNGRNSLANPGIAMATHKDDKERFFPSNGILIFDKQNAARDNADYSDVMLTSEEEIKTTNPVATEEYGIVADNLQQQNTAPQIGTVNSQGALPGMVWQNRDVYLQGPIWAKIPHTDGNFHPSPLMGGFGLKHPPPQILIKNTPVPADPPTTFNQSKLNSFITQYSTGQVSVEIEWELQKENSKRWNPEIQYTSNYYKSTSVDFAVNTEGVYSEPHPIGTRYLTRPL

SEQ ID NO: 1061 - protein, 736 aa, Artificial Sequence
  source: /note="Description of Artificial Sequence: Synthetic polypeptide"
MAADGYLPDWLEDTLSEGIRQWWKLKPGPPPPKPAERHKDDSRGLVLPGYKYLGPFNGLDKGEPVNEADAAALEHDKAYDRQLDSGDNPYLKYNHADAEFQERLKEDTSFGGNLGRAVFQAKKRVLEPLGLVEEPVKTAPGKKRPVEHSPVEPDSSSGTGKAGQQPARKRLNFGQTGDSESVPDPQPLGEPPATPAAVGPNTMATGSGAPMADNNEGADGVGNSSGNWHCDSTWMGDRVITTSTRTWALPTYNNHLYKQISSASTGASNDNHYFGYSTPWGYFDFNRFHCHFSPRDWQRLINNNWGFRPKRLNFKLFNIQVKEVTDNNGVKTIANNLTSTIQVFTDSEYQLPYVLGSAHQGCLPPFPADVFMIPQYGYLTLNNGSQAVGRSSFYCLEYFPSQMLRTGNNFTFSYTFEDVPFHSSYAHSQSLDRLMNPLIDQYLYYLSRTQTTGGKANTQTLGFSQGGPNTMANQAKNWLPGPCYRQQRVSTTTGQNNNSNFAWTAGTKYHLNGRNSLANPGIAMATHKDDKERFFPSNGILIFGKQNAARDNADYSDVMLTSEEEIKTTNPVATEEYGIVADNLQQQNTAPQIGTVNSQGALPGMVWQNRDVYLQGPIWAKIPHTDGNFHPSPLMGGFGLKHPPPQILIKNTPVPADPPTTFNQSKLNSFITQYSTGQVSVEIEWELQKENSKRWNPEIQYTSNYYKSTSVDFAVNTEGVYSEPHPIGTRYLTRPL

SEQ ID NO: 1062 - protein, 736 aa, Artificial Sequence
  source: /note="Description of Artificial Sequence: Synthetic polypeptide"
MAADGYLPDWLEDNLSEGIREWWALKPGAPKPKANQQKQDDGRGLVLPGYKYLGPFNGLDKGEPVNAADAAALEHDKAYDQQLKAGDNPYLRYNHADAEFQERLQEDTSFGGNLGRAVFQAKKRVLEPFGLVEEGAKTAPGKKRPVEQSPQEPDSSSGIGKTGQQPAKKRLNFGQTGDSESVPDPQPLGEPPATPAAVGPTTMASGGGAPMADNNEGADGVGNASGNWHCDSTWLGDRVITTSTRTWALPTYNNHLYKQISSASTGASNDNHYFGYSTPWGYFDFNRFHCHFSPRDWQRLINNNWGFRPKRLNFKLFNIQVKEVTDNNGVKTIANNLTSTVQVFTDSEYQLPYVLGSAHQGCLPPFPADVFMIPQYGYLTLNNGSQAVGRSSFYCLEYFPSQMLRTGNNFTFSYTFEDVPFHSSYAHSQSLDRLMNPLIDQYLYYLSRTQTTGGTGNTQTLGFSQGGPNTMANQAKNWLPGPCYRQQRVSTTTGQNNNSNFAWTAGTKYHLNGRNSLANPGIAMATHKDDKERFFPSNGILIFGKQNAARDNADYSDVMLTSEEEIKTTNPVATEEYGIVADNLQQQNTAPQIGTVNSQGALPGMVWQNRDVYLQGPIWAKIPHTDGNFHPSPLMGGFGLKHPPPQILIKNTPVPADPPTTFNQSKLNSFITQYSTGQVSVEIEWELQKENSKRWNPEIQYTSNYYKSTSVDFAVNTEGVYSEPHPIGTRYLTRPL

SEQ ID NO: 1063 - protein, 736 aa, Artificial Sequence
  source: /note="Description of Artificial Sequence: Synthetic polypeptide"
MAADGYLPDWLEDNLSEGIREWWDLKPGAPKPKANQQKQDDGRGLVLPGYKYLGPFNGLDKGEPVNAADAAALEHDKAYDQQLKAGDNPYLRYNHADAEFQERLQEDTSFGGNLGRAVFQAKKRVLEPLGLVEEGAKTAPGKKRPVEQSPQEPDSSSGIGKTGQQPAKKRLNFGQTGDSESVPDPQPLGEPPATPAAVGPTTMASGGGAPMADNNEGADGVGSSSGNWHCDSTWLGDRVITTSTRTWALPTYNNHLYKQISSASTGASNDNHYFGYSTPWGYFDFNRFHCHFSPRDWQRLINNNWGFRPKRLNFKLFNIQVKEVTQNEGTKTIANNLTSTIQVFTDSEYQLPYVLGSAHQGCLPPFPADVFMIPQYGYLTLNNGSQAVGRSSFYCLEYFPSQMLRTGNNFTFSYTFEDVPFHSSYAHSQSLDRLMNPLIDQYLYYLSRTQTTGGTANTQTLGFSQGGPNTMANQAKNWLPGPCYRQQRVSTTTGQNNNSNFAWTAGTKYHLNGRNSLANPGIAMATHKDDKERFFPSNGILIFGKQNAARDNADYSDVMLTSEEEIKTTNPVATEEYGIVADNLQQQNTAPQIGTVNSQGALPGMVWQNRDVYLQGPIWAKIPHTDGNFHPSPLMGGFGLKHPPPQILIKNTPVPADPPTTFNQSKLNSFITQYSTGQVSVEIEWELQKENSKRWNPEIQYTSNYYKSTSVDFAVNTEGVYSEPHPIGTRYLTRPL

SEQ ID NO: 1064 - protein, 736 aa, Artificial Sequence
  source: /note="Description of Artificial Sequence: Synthetic polypeptide"
MAADGYLPDWLEDNLSEGIREWWALKPGAPKPKANQQKQDDGRGLVLPGYKYLGPFNGLDKGEPVNAADAAALEHDKAYDQQLKAGDNPYLRYNHADAEFQERLQEDTSFGGNLGRAVFQAKKRVLEPLGLVEEGAKTAPGKKRPVEQSPQEPDSSSGIGKTGQQPAKKRLNFGQTGDSESVPDPQPLGEPPATPAAVGPTTMAAGGGAPMADNNEGADGVGSSSGNWHCDSTWMGDRVITTSTRTWALPTYNNHLYKQISSASTGASNDNHYFGYSTPWGYFDFNRFHCHFSPRDWQRLINNNWGFRPKRLSFKLFNIQVKEVTQNEGTKTIANNLTSTIQVFTDSEYQLPYVLGSAHQGCLPPFPADVFMIPQYGYLTLNNGSQAVGRSSFYCLEYFPSQMLRTGNNFTFSYTFEDVPFHSSYAHSQSLDRLMNPLIDQYLYYLSRTQTTGGTANTQTLGFSQGGPNTMANQAKNWLQGPCYRQQRVSTTTGQNNNSNFAWTAGTKYHLNGRNSLANPGIAMATHKDDKERFFPSNGILIFGKQNAARDNADYSDVMLTSEEEIKTTNPVATEEYGIVADNLQQQNTAPQIGTVNSQGALPGMVWQNLDVYLQGPIWAKIPHTDGNFHPSPLMGGFGLKHPPPQILIKNTPVPADPPTTFNQSKLNSFITQYSTGQVSVEIEWELQKENSKRWNPEIQYTSNYYKSTSVDFAVNTEGVYSEPHPIGTRYLTRPL

SEQ ID NO: 1065 - protein, 737 aa, Artificial Sequence
  source: /note="Description of Artificial Sequence: Synthetic polypeptide"
MAADGYLPDWLEDNLSEGIREWWALKPGAPKPKANQQKQDDGRGLVLPGYKYLGPFNGLDKGEPVNAADAAALEHDKAYDQQLKAGDNPYLRYNHADAEFQERLQEDTSFGGNLGRAVFQAKKRVLEPLGLVEEGAKTAPGKKRPVEPSPQRSPDSSSGIGKTGQQPAKKRLNFGQTGDSESVPDPQPLGEPPATPAAVGPTTMASGGGAPMADNNEGADGVGNASGNWHCDSQWLGDRVITTSTRTWALPTYNNHLYKQISSASTGASNDNHYFGYSTPWGYFDFNRFHCHFSPRDWQRLINNNWGFRPKRLNFKLFNIQVKEVTDNNGVKTIANNLTSTVQVFTDSDYQLPYVLGSAHEGCLPPFPADVFMIPQYGYLTLNNGSQAVGRSSFYCLEYFPSQMLRTGNNFQFTYTFEDVPFHSSYAHSQSLDRLMNPLIDQYLYYLSRTQTTGGTANTQTLGFSQGGPNTMANQAKNWVPGPCYRQQRVSTATGQNNNSNFAWTAGTKYHLKGRNSLANPGIAMATHKDDKERFFPSNGILIFGKQNAARDNADYSDVMLTSEEEIKTTNPVATEEYGIVADNLQQQNTAPQIGTVNSQGALPGMVWQNRDVYLQGPIWAKIPHTDGNFHPSPLMGGFGLKHPPPQILIKNTPVPADPPTTFNQSKLNSFITQYSTGQVSVEIEWELQKENSKRWNPEIQYTSNYYKSTSVDFAVNTEGVYSEPHPIGTRYLTRPL

SEQ ID NO: 1066 - protein, 737 aa, Artificial Sequence
  source: /note="Description of Artificial Sequence: Synthetic polypeptide"
  MOD_RES (226)..(226): Any naturally occurring amino acid
  MOD_RES (233)..(233): Any naturally occurring amino acid
  MOD_RES (239)..(239): Any naturally occurring amino acid
  MOD_RES (250)..(250): Any naturally occurring amino acid
  MOD_RES (253)..(253): Any naturally occurring amino acid
  MOD_RES (255)..(255): Any naturally occurring amino acid
MAADGYLPDWLEDTLSEGIRQWWKLKPGPPPPKPAERHKDDSRGLVLPGYKYLGPFNGLDKGEPVNEADAAALEHDKAYDRQLDSGDNPYLKYNHADAEFQERLKEDTSFGGNLGRAVFQAKKRVLEPLGLVEEGAKTAPGKKRPVEQSPQEPDSSSGIGKTGQQPAKKRLNFGQTGDSESVPDPQPLGEPPATPSGVGPNTMAAGGGAPMADNNEGADGVGSSSXNWHCDSXWLGDRXITTSTRTWALXTYXNXLYKQISNSTSGGATNDNTYFGYSTPWGYFDFNRFHCHFSPRDWQRLINNNWGFRPKRLNFKLFNIQVKEVTQNEGTKTIANNLTSTIQVFTDSEYQLPYVLGSAHQGCLPPFPADVFMIPQYGYLTLNNGSQAVGRSSFYCLEYFPSQMLRTGNNFQFTYTFEDVPFHSSYAHSQSLDRLMNPLIDQYLYYLSRTQTTGGTANTQTLGFSQGGPNTMANQAKNWLPGPCYRQQRVSTTTGQNNNSNFAWTAGTKYHLNGRNSLANPGIAMATHKDDKERFFPSNGILIFGKQNAARDNADYSDVMLTSEEEIKTTNPVATEEYGIVADNLQQQNTAPQIGTVNSQGALPGMVWQNRDVYLQGPIWAKIPHTDGNFHPSPLMGGFGLKHPPPQILIKNTPVPADPPTTFSQAKLASFITQYSTGQVSVEIEWELQKENSKRWNPEVQYTSNYAKSANVDFTVDNNGLYTEPRPIGTRYLTRPL

SEQ ID NO: 1067 - protein, 737 aa, Artificial Sequence
  source: /note="Description of Artificial Sequence: Synthetic polypeptide"
MAADGYLPDWLEDNLSEGIREWWDLKPGAPKPKANQQKQDDGRGLVLPGYKYLGPFNGLDKGEPVNAADAAALEHDKAYDQQLKAGDNPYLRYNHADAEFQERLQEDTSFGGNLGRAVFQAKKRVLEPLGLVEEGAKTAPGKKRPVEPSPQRSPDSSTGIGKKGQQPAKKRLNFGQTGDSESVPDPQPIGEPPAGPSGVGSLTMASGGGAPVADNNEGADGVGSSSGNWHCDSQWLGDRVITTSTRTWALPTYNNHLYKQISSASTGASNDNHYFGYSTPWGYFDFNRFHCHFSPRDWQRLINNNWGFRPKRLNFKLFNIQVKEVTDNDGVKTIANNLTSTIQVFTDSEYQLPYVLGSAHQGCLPPFPADVFMIPQYGYLTLNNGSQAVGRSSFYCLEYFPSQMLRTGNNFTFSYTFEDVPFHSSYAHSQSLDRLMNPLIDQYLYYLSRTQTTGGTANTQTLGFSQGGPNTMANHAKNWLPGPCYRQQRVSTTTGQNNNSNFAWTAGTKYHLNGRNSLANPGIAMATHKDDKERFFPSNGILIFGKQNAARDNADYSDVMLTSEEEIKTTNPVATEEYGIVADNLQQQNTAPQIGTVNSQGALPGMVWQNRDVYLQGPIWAKIPHTDGNFHPSPLMGGFGLKHPPPQILIKNTPVPADPPTTFNQSKLNSFITQYSTGQVSVEIEWELQKENSKRWNPEIQYTSNYYKSTSVDFAVNTEGVYSEPHPIGTRYLTRPL

SEQ ID NO: 1068 - protein, 736 aa, Artificial Sequence
  source: /note="Description of Artificial Sequence: Synthetic polypeptide"
MAADGYLPDWLEDTLSEGIRQWWKLKPGPPPPKPAERHKDDSRGLVLPGYKYLGPFNGLDKGEPVNEADAAALEHDKAYDRQLDSGDNPYLKYNHADAEFQERLKEDTSFGGNLGRAVFQAKKRVLEPLGLVEEPVKTAPGKKRPVEHSPVEPDSSSGTGKAGQQPAKKRLNFGQTGDSESVPDPQPLGEPPATPAAVGPTTMASGGGAPMADNNEGADGVGNASGNWHCDSTWLGDRVITTSTRTWALPTYNNHLYKQISSASTGASNDNHYFGYSTPWGYFDFNRFHCHFSPRDWQRLINNNWGFRPKRLNFKLFNIQVKEVTQNEGTKTIANNLTSTIQVFTDSEYQLPYVLGSAHQGCLPPFPADVFMIPQYGYLTLNNGSQAVGRSSFYCLEYFPSQMLRTGNNFQFTYTFEDVPFHSSYAHSQSLDRLMNPLIDQYLYYLSRTQTTGGTANTQTLGFSQGGPNTMANQAKNWLPGPCYRQQRVSTTTGQNNNSNFAWTAGTKYHLNGRNSLANPGIAMATHKDDKERFFPSNGILIFGKQNAARDNADYSDVMLTSEEEIKTTNPVATEEYGIVADNLQQQNTAPQIGTVNSQGALPGMVWQNRDVYLQGPIWAKIPHTDGNFHPSPLMGGFGLKHPPPQILIKNTPVPADPPTTFNQSKLNSFITQYSTGQVSVEIEWELQKENSKRWNPEIQYTSNYYKSTSVDFAVNTEGVYSEPHPIGTRYLTRPL

SEQ ID NO: 1069 - protein, 736 aa, Artificial Sequence
  source: /note="Description of Artificial Sequence: Synthetic polypeptide"
MAADGYLPDWLEDNLSEGIREWWALKPGAPKPKANQQKQDDGRGLVLPGYKYLGPFNGLDKGEPVNAADAAALEHDKAYDQQLQAGDNPYLRYNHADAEFQERLQGDTSFGGNLGRAVFQAKKRVLEPLGLVEEGAKTAPGKKRPVEQSPQEPDSSSGIGKTGQQPAKKRLNFGQTGDSESVPDPQPLGEPPATPAAVGPTTMASGGGAPMADNNEGADGVGNASGNWHCDSTWLGDRVITTSTRTWALPTYNNHLYKQISSASTGASNDNHYFGYSTPWGYFDFNRFHCHFSPRDWQRLINNNWGFRPKRLNFKLFNIQVKEVTDNNGVKTIANNLTSTIQVFTDSEYQLPYVLGSAHQGCLPPFPADVFMIPQYGYLTLNNGSQAVGRSSFYCLEYFPSQMLRTGNNFQFTYTFEDVPFHSSYAHSQSLDRLMNPLIDQYLYYLSRTQTTGGTANTQTLGFSQGGPNTMANQAKNWLPGPCYRQQRVSTTTGQNNNSNFAWTAGTKYHLNGRNSLANPGIAMATHKDDKERFFPSNGILIFGKQNAARDNADYSDVMLTSEEEIKTTNPVATEEYGIVADNLQQQNTAPQIGTVNSQGALPGMVWQNRDVYLQGPIWAKIPHTDGNFHPSPLMGGFGLKHPPPQILIKNTPVPADPPTTFNQSKLNSFITQYSTGQVSVEIEWELQKENSKRWNPEIQYTSNYYKSTSVDFAVNTEGVYSEPHPIGTRYLTRPL

SEQ ID NO: 1070 - protein, 738 aa, Artificial Sequence
  source: /note="Description of Artificial Sequence: Synthetic polypeptide"
MAADGYLPDWLEDTLSEGIRQWWKLKPGPPPPKPAERHKDDSRGLVLPGYKYLGPFNGLDKGEPVNAADAAALEHDKAYDQQLKAGDNPYLRYNHADAEFQERLKEDTSFGGNLGRAVFQAKKRVLEPLGLVEEGAKTAPGKKRPVEPSPQRSPDSSTGIGKKGQQPARKRLNFGQTGDSESVPDPQPLGEPPAAPSGVGPNTMAAGGGAPMADNNEGADGVGSSSGNWHCDSQWLGDRVITTSTRTWALPTYNNHLYKQISNSTSGGSSNDNAYFGYSTPWGYFDFNRFHCHFSPRDWQRLINNNWGFRPKRLNFKLFNIQVKEVTDNNGVKTIANNLTSTVQVFTDSEYQLPYVLGSAHQGCLPPFPADVFMIPQYGYLTLNNGSQAVGRSSFYCLEYFPSQMLRTGNNFTFSYTFEDVPFHSSYAHSQSLDRLMNPLIDQYLYYLSRTQTTGGTANTQTLGFSQGGPNTMANQAKNWLPGPCYRQQRVSTTTGQNNNSNFAWTAGTKYHLNGRNSLANPGIAMATHKDDKERFFPSNGILIFGKQNAARDNADYSDVMLTSEEEIKTTNPVATEEYGIVADNLQQQNTAPQIGTVNSQGALPGMVWQNRDVYLQGPIWAKIPHTDGHFHPSPLMGGFGLKHPPPQILIKNTPVPANPPTTFNQSKLNSFITQYSTGQVSVEIEWELQKENSKRWNPEVQYTSNYAKSANVDFTVDNNGLYTEPRPIGTRYLTRPL

SEQ ID NO: 1071 - protein, 738 aa, Artificial Sequence; identical to SEQ ID NO: 1070
  source: /note="Description of Artificial Sequence: Synthetic polypeptide"

SEQ ID NO: 1072 - protein, 736 aa, Artificial Sequence
  source: /note="Description of Artificial Sequence: Synthetic polypeptide"
MAADGYLPDWLEDNLSEGIREWWALKPGAPKPKANQQKQDDGRGLVLPGYKYLGPFNGLDKGEPVNAADAAALEHDKAYDQQLKAGDNPYLRYNHADAEFQERLQEDTSFGGNLGRAVFQAKKRLLEPLGLVEEGAKTAPGKKRPVEQSPQEPDSSSGIGKTGQQPAKKRLNFGQTGDSESVPDPQPLGEPPATPAAVGPTTMASGGGAPMADNNEGADGVGNSSGNWHCDSTWMGDRVITTSTRTWALPTYNNHLYKQISSASTGASNDNHYFGYSTPWGYFDFNRFHCHFSPRDWQRLINNNWGFRPKRLNFKLFNIQVKEVTQNEGTKTIANNLTSTIQVFTDSEYQLPYVLGSAHQGCLPPFPADVFIIPQYGYLTLNNGSQAVGRSSFYCLEYFPSQMLRTGNNFTFSYTFEDVPFHSSYAHSQSLDRLMNPLIDQYLYYLSRTQTTGGTANTQTLGFSQGGPNTMANQAKNWLPGPCYRQQRVSTTTGQNNNSNFAWTAGTKYHLNGRNSLANPGIAMATHKDDKERFFPSNGILIFGKQNAARDNADYSDVMLTSEEEIKTTNPVATEEYGIVADNLQQQNTAPQIGTVNSQGALPGMVWQNRDVYLQGPIWAKIPHTDGNFHPSPLMGGFGLKHPPPQILIKNTPVPADPPTTFNQSKLNSFITQYSTGQVSVEIEWELQKENSKRWNPEIQYTSNYYKSTSVDFAVNTEGVYSEPHPIGTRYLTRPL

SEQ ID NO: 1073 - protein, 736 aa, Artificial Sequence
  source: /note="Description of Artificial Sequence: Synthetic polypeptide"
MAADGYLPDWLEDNLSEGIREWWALKPGAPKPKANQQKQDDGRGLVLPGYKYLGPFNGLDKGEPVNAADAAALEHDKAYDQQLKAGDNPYLRYNHADAEFQERLQEDTSFGGNLGRAVFQAKKRVLEPFGLVEEAAKTAPGKKRPVEQSPQEPDSSSGIGKTGQQPAKKRLNFGQTGDSESVPDPQPLGEPPATPAAVGPTTMASGGGAPMADNNEGADGVGNASGNWHCDSTWLGDRVITTSTRTWALPTYNNHLYKQISSASTGASNDNHYFGYSTPWGYFDFNRFHCHFSPRDWQRLINNNWGFRPKRLNFKLFNIQVKEVTQNEGTKTIANNLTSTIQVFTDSEYQLPYVLGSAHQGCLPPFPADVFMIPQYGYLTLNNGSQAVGRSSFYCLEYFPSQMLRTGNNFTFSYTFEDVPFHSSYAHSQSLDRLMNPLIDQYLYYLSRTQTTGGTANTQTLGFSQGGPNTMANHAKNWLPGPCYRQQRVSTTTGQNNNSNFAWTAGTKYHLNGRNSLANPGIAMATHKDDKERFFPSNGILIFGKQNAARDNADYSDVMLTSEEEIKTTNPVATEEYGIVADNLQQQNTAPQIGTVNSQGALPGMVWQNRDVYLQGPIWAKIPHTDGNFHPSPLMGGFGLKHPPPQILIKNTPVPADPPTTFNQSKLNSFITQYSTGQVSVEIEWELQKENSKRWNPEIQYTSNYYKSTSVDFAVNTEGVYSEPHPIGTRYLTRPL

SEQ ID NO: 1074 - protein, 736 aa, Artificial Sequence
  source: /note="Description of Artificial Sequence: Synthetic polypeptide"
MAADGYLPDWLEDNLSEGIREWWALKPGAPKPKANQQKQDDGRGLVLPGYKYLGPFNGLDKGEPVNEADAAALEHDKAYDQQLKAGDNPYLRYNHADAEFQERLQEDTSFGGNLGRAVFQAKKRLLEPLGLVEEAAKTAPGKKRPVEQSPQEPDSSAGIGKSGAQPAKKRLNFGQTGDSESVPDPQPLGEPPATPAAVGPTTMASGGGAPMADNNEGADGVGNASGNWHCDSTWLGDRVITTSTRTWALPTYNNHLYKQISSASTGASNDNHYFGYSTPWGYFDFNRFHCHFSPRDWQRLINNNWGFRPKRLNFKLFNIQVKEVTDNDGVKTIANNLTSTIQVFTDSEYQLPYVLGSAHQGCLPPFPADVFMIPQYGYLTLNNGSQAVGRSSFYCLEYFPSQMLRTGNNFQFTYTFEDVPFHSSYAHSQSLDRLMNPLIDQYLYYLSRTQTTGGTANTQTLGFSQGGPNTMANQAKNWLPGPCYRQQRVSTTTGQNNNSNFAWTAGTKYHLNGRNSLANPGIAMATHKDDKERFFPSNGILIFGKQNAARDNADYSDVMLTSEEEIKTTNPVATEEYGIVADNLQQQNTAPQIGTVNSQGALPGMVWQNRDVYLQGPIWAKIPHTDGNFHPSPLMGGFGLKHPPPQILIKNTPVPADPPTTFNQSKLNSFITQYSTGQVSVEIEWELQKENSKRWNPEIQYTSNYYKSTSVDFAVNTEGVYSEPHPIGTRYLTRPL

SEQ ID NO: 1075 - protein, 736 aa, Artificial Sequence
  source: /note="Description of Artificial Sequence: Synthetic polypeptide"
MAADGYLPDWLEDNLSEGIREWWALKPGAPKPKANQQKQDDGRGLVLPGYKYLGPFNGLDKGEPVNAADAAALEHDKAYDQQLKAGDNPYLRYNHADAEFQERLQEDTSFGGNLGRAVFQAKKRVLEPLGLVEEGAKTAPGKKRPVEQSPQEPDSSAGIGKTGAQPAKKRLNFGQTGDSESVPDPQPLGEPPATPAAVGPTTMASGGGAPMADNNEGADGVGSASGNWHCDSTWLGDRVITTSTRTWALPTYNNHLYKQISSASTGASNDNHYFGYSTPWGYFDFNRFHCHFSPRDWQRLINNNWGFRPKRLNFKLFNIQVKEVTDNNGVKTIANNLTSTIQVFTDSEYQLPYVLGSAHQGCLPPFPADVFMIPQYGYLTLNNGSQAVGRSSFYCLEYFPSQMLRTGNNFTFSYTFEDVPFHSSYAHSQSLDRLMNPLIDQYLYYLSRTQTTGGTANTQTLGFSQGGPNTMANQAKNWLPGPCYRQQRVSTTTGQNNNSNFAWTAGTKYHLNGRNSLANPGIAMATHKDDKERFFPSNGILIFGKQNAARDNADYSDVMLTSEEEIKTTNPVATEEYGIVADNLQQQNTAPQIGTVNSQGALPGMVWQNRDVYLQGPIWAKIPHTDGNFHPSPLMGGFGLKHPPPQILIKNTPVPADPPTTFNQSKLNSFITQYSTGQVSVEIEWELQKENSKRWNPEIQYTSNYYKSTSVDFAVNTEGVYSEPHPIGTRYLTRPL

SEQ ID NO: 1076 - protein, 736 aa, Artificial Sequence
  source: /note="Description of Artificial Sequence: Synthetic polypeptide"
MAADGYLPDWLEDNLSEGIREWWDLKPGAPKPKANQQKQDDGRGLVLPGYKYLGPFNGLDKGEPVNAADAAALEHDKAYDQQLKAGDNPYLRYNHADAEFQERLQEDTSFGGNLGRAVFQAKKRLLEPLGLVEEAAKTAPGKKRPVEQSPQEPDSSAGIGKSGAQPAKKRLNFGQTGDTESVPDPQPIGEPPAAPSGVGPNTMAAGGGAPMADNNEGADGVGSSSGNWHCDSQWLGDRVITTSTRTWALPTYNNHLYKQISSASTGASNDNHYFGYSTPWGYFDFNRFHCHFSPRDWQRLINNNWGFRPKRLNFKLFNIQVKEVTQNEGTKTIANNLTSTIQVFTDSEYQLPYVLGSAHQGCLPPFPADVFMIPQYGYLTLNNGSQAVGRSSFYCLEYFPSQMLRTGNNFQFTYTFEDVPFHSSYAHSQSLDRLMNPLIDQYLYYLSRTQTTGGTANTQTLGFSQGGPNTMANHAKNWLPGPCYRQQRVSTTTGQNNNSNFAWTAGTKYHLNGRNSLANPGIAMATHKDDKERFFPSNGILIFGKQNAARDNADYSDVMLTSEEEIKTTNPVATEEYGIVADNLQQQNTAPQIGTVNSQGALPGMVWQNRDVYLQGPIWAKIPHTDGNFHPSPLMGGFGLKHPPPQILIKNTPVPADPPTTFNQSKLNSFITQYSTGQVSVEIEWELQKENSKRWNPEIQYTSNYYKSTSVDFAVNTEGVYSEPHPIGTRYLTRPL

SEQ ID NO: 1077 - protein, 737 aa, Artificial Sequence; identical to SEQ ID NO: 1059
  source: /note="Description of Artificial Sequence: Synthetic polypeptide"

SEQ ID NO: 1078 - protein, 737 aa, Artificial Sequence
  source: /note="Description of Artificial Sequence: Synthetic polypeptide"
MAADGYLPDWLEDNLSEGIREWWALKPGAPKPKANQQKQDDGRGLVLPGYKYLGPFNGLDKGEPVNAADAAALEHDKAYDQQLKAGDNPYLRYNHADAEFQERLKEDTSFGGNLGRAVFQAKKRVLEPFGLVEEGAKTAPGKKRPVEQSPQEPDSSSGIGKTGQQPAKKRLNFGQTGDSESVPDPQPLGEPPAAPSGVGPNTMAAGGGAPMADNNEGADGVGSSSGNWHCDSQWLGNRVITTSTRTWALPTYNNHLYKQISNSTSGGSSNDNAYFGYSTPWGYFDFNRFHCHFSPRDWQRLINNNWGFRPKRLNFKLFNIQVKEVTDNNGVKTIANNLTSTVQVFTDSEYQLPYVLGSAHQGCLPPFPADVFMIPQYGYLTLNNGSQAVGRSSFYCLEYFPSQMLRTGNNFQFTYTFEDVPFHSSYAHSQSLDRLMNPLIDQYLYYLSRTQTTGGTANTQTLGFSQGGPNTMANQAKNWLPGPCYRQQRVSTTTGQNNNSNFAWTAGTKYHLNGRNSLANPGIAMATHKDDKERFFPSNGILIFGKQNAARDNADYSDVMLTSEEEIKTTNPVATEEYGIVADNLQQQNTAPQIGTVNSQGALPGMVWQNRDVYLQGPIWAKIPHTDGNFHPSPLMGGFGLKHPPPQILIKNTPVPADPPTTFNQSKLNSFITQYSTGQVSVEIEWELQKENSKRWNPEIQYTSNYYKSTSVDFAVNTEGVYSEPHPIGTRYLTRPL

SEQ ID NO: 1079 - protein, 736 aa, Artificial Sequence
  source: /note="Description of Artificial Sequence: Synthetic polypeptide"
MAADGYLPDWLEDNLSEGIREWWDLKPGAPKPKANQQKQDDGRGLVLPGYKYLGPFNGLDRGEPVNAADAAALEHDKAYDQQLKAGDNPYLRYNHADAEFQERLQEDTSFGGNLGRAVFQAKKRVLEPLGLVEEGAKTAPGKKRPVEQSPQEPDSSSGIGKTGQQPAKKRLNFGQTGDSESVPDPQPLGEPPATPAAVGPTTMASGGGAPMADNNEGADGVGNASGNWHCDSTWLGDRVITTSTRTWALPTYNNHLYKQISSASTGASNDNHYFGYSTPWGYFDFNRFHCHFSPRDWQRLINNNWGFRPKRLNFKLFNIQVKEVTDNNGVKTIANNLTSTIQVFTDSEYQLPYVLGSAHQGCLPPFPADVFMIPQYGYLTLNNGSQAVGRSSFYCLEYFPSQMLRTGNNFQFTYTFEDVPFHSSYAHSQSLDRLMNPLIDQYLYYLSRTQTTGGTANTQTLGFSQGGPNTMANQAKNWLPGPCYRQQRVSTTTGQNNNSNFAWTAGTKYHLNGRNSLANPGIAMATHKDDKERFFPSNGILIFGKQNAARDNADYSDVMLTSEEEIKTTNPVATEEYGIVADNLQQQNTAPQIGTVNSQGALPGMVWQNRDVYLQGPIWAKIPHTDGNFHPSPLMGGFGLKHPPPQILIKNTPVPADPPTTFNQSKLNSFITQYSTGQVSVEIEWELQKENSKRWNPEIQYTSNYYKSTSVDFAVNTEGVYSEPHPIGTRYLTRPL

SEQ ID NO: 1080 - protein, 736 aa, Artificial Sequence
  source: /note="Description of Artificial Sequence: Synthetic polypeptide"
MAADGYLPDWLEDNLSEGIREWWDLKPGAPKPKANQQKQDDGRGLVLPGYKYLGPFNGLDKGEPVNAADAAALEHDKAYDQQLKAGDNPYLRYNHADAEFQERLQEDTSFGGNLGRAVFQAKKRVLEPLGLVEEGAKTAPGKKRPVEQSPQEPDSSSGIGKKGQQPARKRLNFGQTGDSESVPDPQPLGEPPAAPSGVGSLTMASGGGAPMADNNEGADGVGNASGNWHCDSTWLGDRVITTSTRTWALPTYNNHLYKQISSASTGASNDNHYFGYSTPWGYFDFNRFHCHFSPRDWQRLINNNWGFRPKRLNFKLFNIQVKEVTQNEGTKTIANNLTSTVQVFTDSDYQLPYVLGSAHQGCLPPFPADVFMIPQYGYLTLNNGSQAVGRSSFYCLEYFPSQMLRTGNNFQFTYTFEDVPFHSSYAHSQSLDRLMNPLIDQYLYYLSRTQTTGGTANTQTLGFSQGGPNTMANQAKNWLPGPCYRQQRVSTTTGQNNNSNFAWTAGTKYHLNGRNSLSNPGIAMATHKDDKERFFPSNGILIFGKQNAARDNADYSDVMLTSEEEIKTTNPVATEEYGIVADNLQQQNTAPQIGTVNSQGALPGMVWQNRDMYLQGPIWAKIPHTDGNFHPSPLMGGFGLKHPPPQILIKNTPVPADPPTTFNQSKLNSFITQYSTGQVSVEIEWELQKENSKRWNPEIQYTSNYYKSTSVDFAVNTEGVYSEPHPIGTRYLTRPL

SEQ ID NO: 1081 - protein, 736 aa, Artificial Sequence
  source: /note="Description of Artificial Sequence: Synthetic polypeptide"
MAADGYLPDWLEDNLSEGIREWWALKPGAPKPKANQQKQDDGRGLVLPGYKYLGPFNGLDKGEPVNAADAAALEHDKAYDQQLKAGDNPYLRYNHADAEFQERLQEDTSFGGNLGRAVFQAKKRVLEPFGLVEEGAKTAPGKKRPVEQSPQEPDSSSGIGKTGQQPAKKRLNFGQTGGSESVPDPQPLGEPPATPAAVGPTTMAAGGGAPMADNNEGADGVGSSSGNWHCDSTWLGDRVITTSTRTWALPTYNNHLYKQISSASTGASNDNHYFGYSTPWGYFDFNRFHCHFSPRDWQRLINNNWGFRPKRLNFKLFNIQVKEVTDNNGVKTIANNLTSTVQVFTDSEYQLPYVLGSAHQGCLPPFPADVFMIPQYGYLTLNNGSQAVGRSSFYCLEYFPSQMLRTGNNFTFSYTFEEVPFHSSYAHSQSLDRLMNPLIDQYLYYLSRTQTTGGTANTQTLGFSQGGPNTMANQAKNWLPGPCYRQQRVSTTTGQNNNSNFAWTAGTKYHLNGRNSLANPGIAMASHKDDKERFFPSNGILIFGKQNAARDNADYSDVMLTSEEEIKTTNPVATEEYGIVADNLQQQNTAPQIGTVNSQGALPGMVWQNRDVYLQGPIWAKIPHTDGNFHPSPLMGGFGLKHPPPQILIKNTPVPADPPTTFNQSKLNSFITQYSTGQVSVEIEWELQKENSKRWNPEIQYTSNYYKSTSVDFAVNTEGVYSEPHPIGTRYLTRPL

SEQ ID NO: 1082 - DNA, 2211 bp, Artificial Sequence
  source: /note="Description of Artificial Sequence: Synthetic polynucleotide"
atggctgccgatggttatcttccagattggctcgaggacaacctctctgagggcattcgcgagtggtgggacttgaaacctgcatccccgaaacccaaagccaaccagcaaaagcaggacgacggccggggtctggtgcttcctggctacaagtacctcggacccttcaacggactcgacaagggggagcccgtcaacgcggcggacgcagcggccctcgagcacgacaaggcctacgaccagcagctcaaagcgggtgacaatccgtacctgcggtataaccacgccgacgccgagtttcaggagcgtctgcaagaagatacgtcttttgggggcaacctcgggcgagcagtcttccaggccaaaaagaggcttcttgaacctcttggtctggttgaggaagcggctaagacggctcctggaaagaagaggcctgtagagcagtctcctcaggaaccggactcctccgcgggtattggcaaatcgggtgcacagcccgccaaaaagagactcaatttcggtcagactggcggcacagagtcagttccagaccctcaacctctcggagaacctccagcagcgccctctggtgtgggacctaatacaatggctgcaggcggtggcgcaccaatggcagacaataacgaaggcgccgacggagtgggtagttcctcgggaaattggcattgcgattccacatggctgggcgacagagtcatcaccaccagcaccagaacctgggccctgcccacttacaacaaccatctctacaagcaaatctccagtgcttcaacgggggccagcaacgacaaccactacttcggctacagcaccccctgggggtattttgatttcaacagattccactgccacttctcaccacgtgactggcagcgactcatcaacaacaactggggattccggcccaagagactcagcttcaagctcttcaacatccaggtcaaggaggtcacgcagaatgaaggcaccaagaccatcgccaataacctcaccagcaccatccaggtgtttacggactcggagtaccagctgccgtacgttctcggctctgcccaccagggctgcctgcctccgttcccggcggacgtgttcatgattccccagtacggatacctaacactcaacaacggtagtcaggccgtgggacgctcctccttctactgcctggaatactttccttcgcagatgctgagaaccggcaacaacttccagtttacttacaccttcgaggacgtgcctttccacagcagctacgcccacagccagagcttggaccggctgatgaatcctctgattgaccagtacctgtactacttgtctcggactcaaacaacaggaggcacggcaaatacgcagactctgggcttcagccaaggtgggcctaatacaatggccaatcaggcaaagaactggctgccaggaccctgttaccgccaacaacgcgtctcaacgacaaccgggcaaaacaacaatagcaactttgcctggactgctgggaccaaataccatctgaatggaagaaattcattggctaatcctggcatcgctatggcaacacacaaagacgacaaggagcgtttttttcccagtaacgggatcctgatttttggcaaacaaaatgctgccagagacaatgcggattacagcgatgtcatgctcaccagcgaggaagaaatcaaaaccactaaccctgtggctacagaggaatacggtatcgtggcagataacttgcagcagcaaaacacggctcctcaaattggaactgtcaacagccagggggccttacccggtatggtctggcagaaccgggacgtgtacctgcagggtcccatctgggccaagattcctcacacggacggcaacttccacccgtctccgctgatgggcggctttggcctgaaacatcctccgcctcagatcctgatcaagaacacgcctgtacctgcggatcctccgaccaccttcaaccagtcaaagctgaactctttcatcacgcaatacagcaccggacaggtcagcgtggaaattgaatgggagctgcagaaggaaaacagcaagcgctggaaccccgagatccagtacacctccaactactacaaatctacaagtgtggactttgctgttaatacagaaggcgtgtactctgaaccccaccccattggcacccgttacctcacccgtcccctgtaa

SEQ ID NO: 1083 - DNA, 2211 bp, Artificial Sequence
  source: /note="Description of Artificial Sequence: Synthetic polynucleotide"
atggctgccgatggttatcttccagattggctcgaggacaacctctctgagggcattcgcgagtggtgggacttgaaacctggagccccgaaacccaaagccaaccagcaaaagcaggacgacggccggggtctggtgcttcctggctacaagtacctcggacccttcaacggactcgacaagggggagcccgtcaacgcggcggacgcagcggccctcgagcacgacaaggcctacgaccagcagctcaaagcgggtgacaatccgtacctgcggtataaccacgccgacgccgagtttcaggagcgtctgcaagaagatacgtcttttgggggcaacctcgggcgagcagtcttccaggccaagaagagggttctcgaaccttttggtctggttgaggaaggcgctaagacggctcctggaaagaaacgtccggtagagcagtcgccacaagagccagactcctcctcgggcattggcaagacaggccagcagcccgctaaaaagagactcaattttggtcagactggcgactcagagtcagtccccgacccacaacctctcggagaacctccagcaacccccgctgctgtgggacctactacaatggcttcaggtggtggcgcaccaatggcagacaataacgaaggcgccgacggagtgggtaatgcctcaggaaattggcattgcgattcccaatggctgggggacagagtcatcaccaccagcacccgaacctgggccctgcccacctacaacaatcacctctacaagcaaatctccagtgcttcaacgggggccagcaacgacaaccactacttcggctacagcaccccctgggggtattttgatttcaacagattccactgccatttctcaccacgtgactggcagcgactcatcaacaacaattggggattccggcccaagagactcaacttcaaactcttcaacatccaagtcaaggaggtcacgcagaatgaaggcaccaagaccatcgccaataacctcaccagcaccatccaggtgtttacggactcggagtaccagctgccgtacgttctcggctccgcccaccagggctgcctgcctccgttcccggcggacgtgttcatgattccccagtacggctacctaacactcaacaacggtagtcaggccgtgggacgctcctccttctactgcctggaatactttccttcgcagatgctgagaaccggcaacaacttccagtttacttacaccttcgaggacgtgcctttccacagcagctacgcccacagccagagcttggaccggctgatgaatcctctgattgaccagtacctgtactacttgtctcggactcaaacaacaggaggcacggcaaatacgcagactctgggcttcagccaaggtgggcctaatacaatggccaatcaggcaaagaactggctgccaggaccctgttaccgccaacaacgcgtctcaacgacaaccgggcaaaacaacaatagcaactttgcctggactgctgggaccaaataccatctgaatggaagaaattcattggctaatcctggcatcgctatggcaacacacaaagacgacaaggagcgtttttttcccagtaacgggatcctgatttttggcaaacaaaatgctgccagagacaatgcggattacagcgatgtcatgctcaccagcgaggaagaaatcaaaaccactaaccctgtggctacagaggaatacggtatcgtggcagataacttgcagcagcaaaacacggctcctcaaattggaactgtcaacagccagggggccttacccggtatggtctggcagaaccgggacgtgtacctgcagggtcccatctgggccaagattcctcacacggacggcaacttccacccgtctccgctgatgggcggctttggcctgaaacatcctccgcctcagatcctgatcaagaacacgcctgtacctgcggatcctccgaccaccttcaaccagtcaaagctgaactctttcatcacgcaatacagcaccggacaggtcagcgtggaaattgaatgggagctgcagaaggaaaacagcaagcgctggaaccccgagatccagtacacctccaactactacaaatctacaagtgtggactttgctgttaatacagaaggcgtgtactctgaaccccaccccattggcacccgttacctcacccgtcccctgtaa

SEQ ID NO: 1084 - DNA, 2211 bp, Artificial Sequence
  source: /note="Description of Artificial Sequence: Synthetic polynucleotide"
atggctgccgatggttatcttccagattggctcgaggacaacctctctgagggcattcgcgagtggtgggacttggaacctggagccccgaagcccaaagccaaccagcaaaagcaggacgacggccggggtctggtgcttcctggctacaagtacctcggacccttcaacggactcgacaagggggagcccgtcaacgcggcggacgcagcggccctcgagcacgacaaggcctacgaccagcagctcaaagcgggtgacaatccgtacctgcggtataaccacgccgacgccgagtttcaggagcgtctgcaagaagatacgtcttttgggggcaacctcgggcgagcagtcttccaggccaagaagcgggttctcgaacctctcggtctggttgaggaaggcgctaagacggctcctggaaagaaacgtccggtagagcagtcgccacaagagccagactcctcctcgggcatcggcaagacaggccagcagcccgctaaaaagagactcaattttggtcagactggcgactcagagtcagtccccgatccacaacctctcggagaacctccagcaacccccgctgctgtgggacctactacaatggcttcaggcggtggcgcaccaatggcagacaataacgaaggcgccgacggagtgggtaatgcctcaggaaattggcattgcgattccacatggctgggcgacagagtcatcaccaccagcacccgcacctgggccttgcccacctacaataaccacctctacaagcaaatctccagtgcttcaacaggggccagcaacgacaaccactacttcggctacagcaccccctgggggtattttgacttcaacagattccactgccacttctcaccacgtgactggcagcgactcatcaacaacaactggggattccggcctaagcgactcaacttcaagctcttcaacattcaggtcaaagaggttacggacaacaatggagtcaagaccatcgccaataaccttaccagcacggtccaggtcttcacggactcggagtaccagttgccgtacgtcctcggctctgcgcaccagggctgcctccctccgttcccggcggacgtgttcatgattccgcagtacggctacctaacgctcaacaacggtagtcaggccgtgggacgctcctccttctactgcctggaatactttccttcgcagatgctgagaaccggcaacaacttccagtttacttacaccttcgaggacgtgcctttccacagcagctacgcccacagccagagcttggaccggctgatgaatcctctgattgaccagtacctgtactacttgtctcggactcaaacaacaggaggcacggcaaatacgcagactctgggcttcagccaaggtgggcctaatacaatggccaatcaggcaaagaactggctgccaggaccctgttaccgccaacaacgcgtctcaacgacaaccgggcaaaacaacaatagcaactttgcctggactgctgggaccaaataccatctgaatggaagaaattcattggctaatcctggcatcgctatggcaacacacaaagacgacaaggagcgtttttttcccagtaacgggatcctgatttttggcaaacaaaatgctgccagagacaatgcggattacagcgatgtcatgctcaccagcgaggaagaaatcaaaaccactaaccctgtggctacagaggaatacggtatcgtggcagataacttgcagcagcaaaacacggctcctcaaattggaactgtcaacagccagggggccttacccggtatggtctggcagaaccgggacgtgtacctgcagggtcccatctgggccaagattcctcacacggacggcaacttccacccgtctccgctgatgggcggctttggcctgaaacatcctccgcctcagatcctgatcaagaacacgcctgtacctgcggatcctccgaccaccttcaaccagtcaaagctgaactctttcatcacgcaatacagcaccggacaggtcagcgtggaaattgaatgggagctgcagaaggaaaacagcaagcgctggaaccccgagatccagtacacctccaactactacaaatctacaagtgtggactttgctgttaatacagaaggcgtgtactctgaaccccaccccattggcacccgttacctcacccgtcccctgtaa

SEQ ID NO: 1085 - DNA, 2211 bp, Artificial Sequence
  source: /note="Description of Artificial Sequence: Synthetic polynucleotide"
atggctgccgatggttatcttccagattggctcgaggacactctctctgaaggaataagacagtggtggaagctcaaacctggcccaccaccaccaaagcccgcagagcggcataaggacgacagcaggggtcttgtgcttcctgggtacaagtacctcggacccttcaacggactcgacaagggagagccggtcaacgaggcagacgccgcggccctcgagcacgacaaagcctacgaccggcagctcgacagcggagacaacccgtacctcaagtacaaccacgccgacgcggagtttcaggagcgccttaaagaagatacgtcttttgggggcaacctcgggcgagcagtcttccaggccaagaagagggttctcgaaccttttggtctggttgaggaaggtgctaagacggctcctggaaagaaacgtccggtagagcagtcgccacaagagccagactcctcctcgggcattggcaagacaggccagcagcccgctaaaaagagactcaattttggtcagactggcgactcagagtcagtccccgacccacaacctctcggagaacctccagcaacccccgctgctgtgggacctactacaatggcttcaggcggtggcgcaccaatggcagacaataacgaaggcgccgacggagtgggtaatgcctcaggaaattggcattgcgattccacatggctgggcgacagagtcatcaccaccagcacccgaacatgggccttgcccacctataacaaccacctctacaagcaaatctccagtgcttcaacgggggccagcaacgacaaccactacttcggctacagcaccccctgggggtattttgacttcaacagattccactgccacttctcaccacgtgactggcagcgactcatcaacaacaactggggattccggcctaagcgactcaacttcaagctcttcaacattcaggtcaaagaggttacggacaacaatggagtcaagaccatcgccaataaccttaccagcacggtccaggtcttcacggactcagactatcagctcccgtacgtgctcgggtcggctcacgagggctgcctcccgccgttcccagcggacgttttcatgattcctcagtacggctacctaacactcaacaacggtagtcaggccgtgggacgctcctccttctactgcctggaatactttccttcgcagatgctgagaaccggcaacaacttccagtttacttacaccttcgaggacgtgcctttccacagcagctacgcgcacagccagagtctggaccggctgatgaatcctctgattgaccagtacctgtactacttgtctcggactcaaacaacaggaggcacggcaaatacgcagactctgggcttcagccaaggtgggcctaatacaatggccaatcaggcaaagaactggctgccaggaccctgttaccgccaacaacgcgtctcaacgacaaccgggcaaaacaacaatagcaactttgcctggactgctgggaccaaataccatctgaatggaagaaattcattggctaatcctggcatcgctatggcaacacacaaagacgacaaggagcgtttttttcccagtaacgggatcctgattttcggcaaacaaaatgctgccagagacaatgcggattacagcgatgtcatgctcaccagcgaggaagaaatcaaaaccactaaccctgtggctacagaggaatacggtatcgtggcagataacttgcagcagcaaaacacggctcctcaaattggaactgtcaacagccagggggccttacccggtatggtctggcagaaccgggacgtgtacctgcagggtcccatctgggccaagattcctcacacggacggcaacttccacccgtctccgctgatgggcggctttggcctgaaacatcctccgcctcagatcctgatcaagaacacgcctgtacctgcggatcctccgaccaccttcaaccagtcaaagctgaactctttcatcacgcaatacagcaccggacaggtcagcgtggaaattgaatgggagctgcagaaggaaaacagcaagcgctggaaccccgagatccagtacacctccaactactacaaatctacaagtgtggactttgctgttaatacagaaggcgtgtactctgaaccccaccccattggcaccagatacctgactcgtaatctgtaa

SEQ ID NO: 1086 - DNA, 2208 bp, Artificial Sequence
  source: /note="Description of Artificial Sequence: Synthetic polynucleotide"
atggctgccgatggttatcttccagattggctcgaggacactctctctgaaggaataagacagtggtggaagctcaaacctggcccaccaccaccaaagcccgcagagcggcataaggacgacagcaggggtcttgtgcttcctgggtacaagtacctcggacccttcaacggactcgacaagggagagccggtcaacgaggcagacgccgcggccctcgagcacgacaaagcctacgaccggcagctcgacagcggagacaacccgtacctcaagtacaaccacgccgacgcggagtttcaggagcgccttaaagaagatacgtcttttgggggcaacctcggacgagcagtcttccaggcgaaaaagagggttcttgaacctctgggcctggttgaggaacctgttaagacggctccgggaaaaaagaggccggtagagcagtcgccacaagagccagactcctcctcgggcatcggcaagaaaggccagcagcccgctaaaaagagactcaattttggtcagactggcgactcagagtcagtccccgacccacaacctctcggagaacctccagcaacccccgctgctgtgggacctactacaatggcttcaggcggtggcgcaccaatggcggacaataacgaaggcgccgatggagtgggtaatgcctcaggaaattggcattgcgattccacatggctgggcgacagagtcatcaccaccagcacccgaacatgggccttgcccacctataacaaccacctctacaagcaaatctccagtgcttcaacgggggccagcaacgacaaccactacttcggctacagcaccccctgggggtattttgacttcaacagattccactgccacttctcaccacgtgactggcagcgactcatcaacaacaactggggattccggcctaagcgactcaacttcaagctcttcaacattcaggtcaaagaggttacggacaacaatggagtcaagaccatcgccaataaccttaccagcacggtccaggtcttcacggactcagactatcagctcccgtacgttctcggctctgcccaccagggctgcctgcctccgttcccggcggacgtgttcatgattccccagtacggctacctaacactcaacaacggtagtcaggccgtgggacgctcctccttctactgcctggaatactttccttcgcagatgctgagaaccggcaacaacttccagtttacttacaccttcgaggacgtgcctttccacagcagctacgcccacagccagagcttggaccggctgatgaatcctctgattgaccagtacctgtactacttgtctcggactcaaacaacaggaggcacggcaaatacgcagactctgggcttcagccaaggtgggcctaatacaatggccaatcaggcaaagaactggctgccaggaccctgttaccgccaacaacgcgtctcaacgacaaccgggcaaaacaacaatagcaactttgcctggactgctgggaccaaataccatctgaatggaagaaattcattggctaatcctggcatcgctatggcaacacacaaagacgacaaggagcgtttttttcccagtaacgggatcctgatttttggcaaacaaaatgctgccagagacaatgcggattacagcgatgtcatgctcaccagcgaggaagaaatcaaaaccactaaccctgtggctacagaggaatacggtatcgtggcagataacttgcagcagcaaaacacggctcctcaaattggaactgtcaacagccagggggccttacccggtatggtctggcagaaccgggacgtgtacctgcagggtcccatctgggccaagattcctcacacggacggcaacttccacccgtctccgctgatgggcggctttggcctgaaacatcctccgcctcagatcctgatcaagaacacgcctgtacctgcggatcctccgaccaccttcaaccagtcaaagctgaactctttcatcacgcaatacagcaccggacaggtcagcgtggaaattgaatgggagctgcagaaggaaaacagcaagcgctggaaccccgagatccagtacacctccaactactacaaatctacaagtgtggactttgctgttaatacagaaggcgtgtactctgaaccccaccccattggcacccgttacctcacccgtcccctg

SEQ ID NO: 1087 - DNA, 2211 bp, Artificial Sequence
  source: /note="Description of Artificial Sequence: Synthetic polynucleotide"
atggctgccgatggttatcttccagattggctcgaggacactctctctgaaggaataagacagtggtggaagctcaaacctggcccaccaccaccaaagcccgcagagcggcataaggacgacagcaggggtcttgtgcttcctgggtacaagtacctcggacccttcaacggactcgacaagggagagccggtcaacgaggcagacgccgcggccctcgagcacgacaaagcctacgaccagcagctccaagcgggtgacaatccgtacctgcggtataaccacgccgacgccgagtttcaggagcgtcttcaaggagatacgtcttttgggggcaacctcggacgagcagtcttccaggccaaaaagaggcttcttgaacctcttggtctggttgaggaagcggctaagacggctcctggaaagaagaggcctgtagagcagtctcctcaggaaccggactcctccgcgggtattggcaaatcgggtgcacagcccgctaaaaagagactcaatttcggtcagactggcgacacagagtcagtcccagaccctcaaccaatcggagaacctcccgcagccccctcaggtgtgggatctcttacaatggcttcaggtggtggcgcaccagtggcagacaataacgaaggtgccgatggagtgggtagttcctcgggaaattggcattgcgattcccaatggctgggggacagagtcatcaccaccagcacccgaacatgggccttgcccacctataacaaccacctctacaagcaaatctccagtgcttcaacgggggccagcaacgacaaccactacttcggctacagcaccccctgggggtattttgacttcaaccgcttccactgccacttctcaccacgtgactggcagcgactcatcaacaacaactggggattccggcccaagagactcagcttcaagctcttcaaccatccaggtcaaggaggtcacgcagaatgaaggcaccaagaccatcgccaataacctcaccagcacatccaggtgtttacggactcggagtaccagctgccgtacgttctcggctctgcccaccagggctgcctgcctccgttcccggcggacgtgttcatgattccccagtacggctacctaacactcaacaacggtagtcaggccgtgggacgctcctccttctactgcctggaatactttccttcgcagatgctgagaaccggcaacaacttccagttcacttacaccttcgaggacgtgcctttccacagcagctacgcgcacagccagagcttggaccggctgatgaatcctctgattgaccagtacctgtactacttgtctcggactcaaacaacaggaggcacggcaaatacgcagactctgggcttcagccaaggtgggcctaatacaatggccaatcaggcaaagaactggctgccaggaccctgttaccgccaacaacgcgtctcaacgacaaccgggcaaaacaacaatagcaactttgcctggactgctgggaccaaataccatctgaatggaagaaattcattgggtaatcctggcatcgctatggcaacacacaaagacgacaaggagcgtttttttcccagtaacgggatcctgatttttggcaaacaaaatgctgccagagacaatgcggattacagcgatgtcatgctcaccagcgaggaagaaatcaaaaccactaaccctgtggctacagaggaatacggtatcgtggcagataacttgcagcagcaaaacacggctcctcaaattggaactgtcaacagccagggggccttacccggtatggtctggcagaaccgggacgtgtacctgcagggtcccatctgggccaagattcctcacacggacggcaacttccacccgtctccgctgatgggcggctttggcctgaaacatcctccgcctcagatcctcatcaaaaacacacctgtacctgcggatcctccaacggccttcaaccagtcaaagctgaactctttcatcacgcaatacagcaccggacaggtcagcgtggaaattgaatgggagctgcagaaggaaaacagcaagcgctggaaccccgagatccagtacacctccaactactacaaatctacaagtgtggactttgctgttaatacagaaggcgtgtactctgaaccccaccccattggcacccgttacctcacccgtcccctgtaa

SEQ ID NO: 1088 - DNA, 2214 bp, Artificial Sequence
  source: /note="Description of Artificial Sequence: Synthetic polynucleotide"
atggctgccgatggttatcttccagattggctcgaggacaacctctctgagggcattcgcgagtggtgggacttgaaacatggagccccgaaacccaaagccaaccagcaaaagcaggacgacggccggggtctggtgcttcctggctacaagtacctcggacccttcaacggactcgacaagggggagcccgtcaacgcggcggatgcagcggccctcgagcacgacaaggcctacgaccagcagctcaaagcgggtgacaatccgtacctgcggtataaccacgccgacgccgagtttcaggagcgtctgcaagaagatacgtcttttgggggcaacctcgggcgagcagtcttccaggccaagaagagggttctcgaaccttttggtctggttgaggaaggtgctaagacggctcctggaaagaaacgtccggtagagcagtcgccacaagagccagactcctcctcgggcattggcaagacaggccagcagcccgctaaaaagagactcaattttggtcagactggcgactcagagtcagtccccgacccacaacctctcggagaacctccagcaacccccgctgctgtgggacctactacaatggcttcaggcggtggcgcaccaatggcagacaataacgaaggcgccgacggagtgggtaatgcctcaggaaattggcattgcgattccacatggctgggcgacagagtcatcaccaccagcacccgaacatgggccttgcccacctataacaaccacctctacaagcaaatctccaacgggacttcgggaggaagcaccaacgacaacacctacttcggctacagcaccccctgggggtattttgactttaacagattccactgccacttctcaccacgtgactggcagcgactcatcaacaacaactggggattccggcccaagagactcaacttcaaactcttcaacatccaagtcaaggaggtcacgcagaatgaaggcaccaagaccatcgccaataacctcaccagcaccatccaggtgtttacggactcggagtaccagctgccgtacgttctcggctccgcccaccagggctgcctgcctccgttcccggcggacgtgttcatgattccccagtacggctacctaacactcaacaacggtagtcaggccgtgggacgctcctccttctactgcctggaatactttccttcgcagatgctgagaacgggcaacaactttaccttcagctacacctttgaggacgttcctttccacagcagctacgctcacagccagagtctggaccgtctcatgaatcctctgattgaccagtacctgtactacttgtctcggactcaaacaacaggaggcacggcaaatacgcagactctgggcttcagccaaggtgggcctaatacaatggccaatcaggcaaagaactggctgccaggaccctgttaccgccaacaacgcgtctcaacgacaaccgggcaaaacaacaatagcaactttgcctggactgctgggaccaaataccatctgaatggaagaaattcattggctaatcctggcatcgctatggcaacacacaaagacgacaaggagcgtttttttcccagtaacgggatcctgatttttggcaaacaaaatgctgccagagacaatgcggattacagcgatgtcatgctcaccagcgaggaagaaatcaaaaccactaaccctgtggctacagaggaatacggtatcgtggcagataacttgcagcagcaaaacacggctcctcaaattggaactgtcaacagccagggggccttacccggtatggtctggcagaaccgggacgtgtacctgcagggtcccatctgggccaagattcctcacacggacggcaacttccacccgtctccgctgatgggcggctttggcctgaaacatcctccgcctcagatcctgatcaagaacacgcctgtacctgcggatcctccgaccaccttcaaccagtcaaagctgaactctttcatcacgcaatacagcaccggacaggtcagcgtggaaattgaatgggagctgcagaaggaaaacagcaagcgctggaaccccgagatccagtacacctccaactactacaaatctacaagtgtggactttgctgttaatacagaaggcgtgtactctgatccccaccccattggcacccgttacctcacccgtcccctgtaa

SEQ ID NO: 1089 - DNA, 2214 bp, Artificial Sequence
  source: /note="Description of Artificial Sequence: Synthetic polynucleotide"
atggctgccgatggttatcttccagattggctcgaggacaacctctctgagggcattcgcgagtggtgggcgctgaaacctggagccccgaagcccaaagccaaccagcaaaagcaggacgacggccggggtctggtgcttcctggctacaagtacctcggacccttcaacggactcgacaaaggagagccggtcaacgaggcggacgcggcagccctcgaacacgacaaggcctacgaccagcagctcaaagcgggtgacaatccgtacctgcggtataaccacgccgacgccgagtttcaggagcgtctgcaagaagatacgtcttttgggggcaacctcgggcgagcagtcttccaggccaagaagcgggttctcgaacctctcggtctggttgaggaaggcgctaagacggctcctggaaagaagagaccggtagagccatcaccccagcgttctccagactcctctacgggcatcggcaagaaaggccagcagcccgccagaaaaagactcaattttggtcagactggcgactcagagtcagttccagaccctcaacctctcggagaacctccagcagcgccctctggtgtgggacctaatacaatggcttcaggcggtggcgcaccaatggcagacaataacgagggcgccgacggagtgggtaattcctcgggaaattggcattgcgattccacatggatgggcgacagagtcatcaccaccagcacccgaacctgggccctgcccacctacaacaaccacctctacaagcaaatctccagtgcttcaacgggggccagcaacgacaaccactacttcggctacagcaccccctgggggtattttgactttaacagattccactgccacttttcaccacgtgactggcagcgactcatcaacaacaactggggattccggcccaagagactcaacttcaagctcttcaacatccaagtcaaggaggtcacgcagaatgaaggcaccaagaccatcgccaataacctcaccagcaccatccaggtgtttacggactcggagtaccagctgccgtacgttctcggctctgcccaccagggctgcctgcctccgttcccggcggacgtgttcatgattccccagtacggctacctaacactcaacaacggtagtcaggccgtgggacgctcctccttctactgcctggaatactttccttcgcagatgctgagaaccggcaacaacttccagtttacttacaccttcgaggacgtgcctttccacagcagctacgcgcacagccagagcttggaccggctgatgaatcctctgattgaccagtacctgtactacttgtctcggactcaaacaacaggaggcacggcaaatacgcagactctgggcttcagccaaggtgggcctaatacaatggccaatcaggcaaagaactggctgccaggaccctgttaccgccaacaacgcgtctcaacgacaaccgggcaaaacaacaatagcaactttgcctggactgctgggaccaaataccatctgaatggaagaaattcattggctaatcctggcatcgctatggcaacacacaaagacgacaaggagcgtttttttcccagtaacgggatcctgatttttggcaaacaaaatgctgccagagacaatgcggattacagcgatgtcatgctcaccagcgaggaagaaatcaaaaccactaaccctgtggctacagaggaatacggtatcgtggcagataacttgcagcagcaaaacacggctcctcaaattggaactgtcaacagccagggggccttacccggtatggtctggcagaaccgggacgtgtacctgcagggtcccatctgggccaagattcctcacacggacggcaacttccacccgtctccgctgatgggcggctttggcctgaaacatcctccgcctcagatcctgatcaagaacacgcctgtacctgcggatcctccgaccaccttcaaccagtcaaagctgaactctttcatcacacaatacagcaccggacaggtcagcgtggaaattgaatgggagctgcagaaggaaaacagcaagcgctggaaccccgagatccagtacacctccaactactacaaatctacaagtgtggactttgctgttaatacagaaggcgtgtactctgaaccccaccccattggcacccgttacctcacccgtcccctgtaa

SEQ ID NO: 1090 - DNA, 2211 bp, Artificial Sequence
  source: /note="Description of Artificial Sequence: Synthetic polynucleotide"
  modified_base (676)..(676): a, c, g, or t
atggctgccgatggttatcttccagattggctcgaggacactctctctgaaggaataagacagtggtggaagctcaaacctggcccaccaccaccaaagcccgcagagcggcataaggacgacagcaggggtcttgtgcttcctgggtacaagtacctcggacccttcaacggactcgacaagggagagccggtcaacgaggcagacgccgcggccctcgagcacgacaaagcctacgaccggcagctcgacagcggagacaacccgtacctcaagtacaaccacgccgacgcggagtttcaggagcgccttaaagaagatacgtcttttgggggcaacctcggacgagcagtcttccaggcgaaaaagagggttcttgaacctctgggcctggttgaggaacctgttaagacggctccgggaaaaaagaggccggtagagcagtcgccacaagagccagactcctcctcgggcatcggcaagaaaggccagcagcccgctaaaaagagactcaattttggtcagactggcgactcagagtcagtccccgacccacaacctctcggagaacctccagcaacccccgctgctgtgggacctactacaatggcttcaggcggtggcgcaccaatggcggacaataacgaaggcgccgatggagtgggtaatgcctcangaaattggcattgcgattccacatggctgggcgacagagtcatcaccaccagcacccgaacatgggccttgccacctataacaaccacctctacaagcaaatctccagtgcttcaacgggggcgcagcaacgacaaccactacttcggctacagcaccccctgggggtattttgacttcaacagattccactgccacttctcaccacgtgactggcagcgactcatcaacaacaactggggattccggcctaagcgactcaacttcaagctcttcaacattcaggtcaaagaggttacggacaacaatggagtcaagaccatcgccaataaccttaccagcacggtccaggtcttcacggactcagactatcagctcccgtacgttctcggctctgcccaccagggctgcctgcctccgttcccggcggacgtgttcatgattccccagtacggctacctaacactcaacaacggtagtcaggccgtgggacgctcctccttctactgcctggaatactttccttcgcagatgctgagaaccggcaacaacttccagtttacttacaccttcgaggacgtgcctttccacagcagctacgcccacagccagagcttggaccggctgatgaatcctctgattgaccagtacctgtactacttgtctcggactcaaacaacaggaggcacggcaaatacgcagactctgggcttcagccaaggtgggcctaatacaatggccaatcaggcaaagaactggctgccaggaccctgttaccgccaacaacgcgtctcaacgacaaccgggcaaaacaacaatagcaactttgcctggactgctgggaccaaataccatctgaatggaagaaattcattggctaatcctggcatcgctatggcaacacacaaagacgacaaggagcgtttttttcccagtaacgggatcctgatttttggcaaacaaaatgctgccagagacaatgcggattacagcgatgtcatgctcaccagcgaggaagaaatcaaaaccactaaccctgtggctacagaggaatacggtatcgtggcagataacttgcagcagcaaaacacggctcctcaaattggaactgtcaacagccagggggccttacccggtatggtttggcagaaccgggacgtgtacctgcagggtcccatctgggccaagattcctcacacggacggcaacttccacccgtctccgctgatgggcggctttggcctgaaacatcctccgcctcagatcctgatcaagaacacgcctgtacctgcggatcctccgaccaccttcaaccagtcaaagctgaactctttcatcacacagtactccacgggacaggtcagcgtggaaattgaatgggagctgcagaaggaaaacagcaagcgctggaacccggagatccagtacacttccaactactacaaatctacaaatgtggactttgctgttaacacagaaggcgtgtactctgaaccccaccccattggcacccgttacctcacccgtcccctgtaa

SEQ ID NO: 1091 - DNA, 2211 bp, Artificial Sequence
  source: /note="Description of Artificial Sequence: Synthetic polynucleotide"
  modified_base (715)..(715): a, c, g, or t
atggctgccgatggttatcttccagattggctcgaggacaacctctctgagggcattcgcgagtggtgggacttgaaacctggagccccgaaacccaaagccaaccagcaaaagcaggacgacggccggggtctggtgcttcctggctacaagtacctcggacccttcaacggactcgacaagggggagcccgtcaacgcggcggatgcagcggccctcgagcacgacaaggcctacgaccagcagctccaagcgggtgacaatccgtacctgcggtataaccacgccgacgccgagtttcaggagcgtcttcaaggagatacgtcttttgggggcaacctcggacgagcagtcttccaggccaagaagcgggttctcgaacctctcggtctggttgaggaagcggctaagacggctcctggaaagaagaggcctgtagagcagtctcctcaggaaccggactcctccgcgggtattggcaaatcgggtgcacagcccgctaaaaagagactcaatttcggtcagactggcgacacagagtcagtcccagaccctcaaccaatcggagaacctcccgcagccccctctggtgtgggacctaatacaatggctgcaggcggtggcgcaccaatggcagacaataacgaaggcgccgatggagtgggtagttcctcgggaaattggcattgcgattccacatggctgggcgacagantcatcaccaccagcacccgaacctgggccctgcccacctataacaaccatctctacaagcaaatctccagtgcttcaacgggggccagcaacgacaaccactacttcggctacagcaccccctgggggtattttgacttcaacagattccactgccacttctcaccacgtgactggcagcgactcatcaacaacaactggggattccggcctaagcgactcaacttcaagctcttcaacattcaggtcaaagaggttacggacaacaatggagtcaagaccatcgccaataaccttaccagcacggtccaggtcttcacggactcggagtaccagttgccgtacgtcctcggctctgcgcaccagggctgcctgcctccgttcccggcggacgtgttcatgattccgcagtacggctacctaacgctcaacaatggcagccaggcagtgggacggtcatccttttactgcctggaatatttcccatcgcagatgctgagaacgggcaacaactttaccttcagctacacttttgaggacgttcctttccacagcagctacgctcacagccagagtctggaccgtctcatgaatcctctgattgaccagtacctgtactacttgtctcggactcaaacaacaggaggcacggcaaatacgcagactctgggcttcagccaaggtgggcctaatacaatggccaatcaggcaaagaactggctgccaggaccctgttaccgccaacaacgcgtctcaacgacaaccggacaaaacaacaatagcaactttgcctggactgctgggaccaaataccatctgaatggaagaaattcattggctaatcctggcatcgctatggcaacacacaaagacgacaaggagcgtttttttcccagtaacgggatcctgatttttggcaaacaaaatgctgccagagacaatgcggattacagcgatgtcatgctcaccagcgaggaagaaatcaaaaccactaaccctgtggctacagaggaatacggtatcgtggcagataactttcagcagcaaaacacggctcctcaaattggaactgtcaacagccagggggccttacccggtatggtctggcagaaccgggacgtgtacctgcagggtcccatctgggccaagattcctcacacggacggcaacttccacccgtctccgctgatgggcggctttggcctgaaacatcctccgcctcagatcctgatcaagaacacgcctgtacctgcggatcctccgaccaccttcaaccagtcaaagctgaactctttcatcacgcaatacagcaccggacaggtcagcgtggaaattgaatgggagctgcagaaggaaaacagcaagcgctggaaccccgagatccagtacacctccaactactacaaatctacaagtgtggactttgctgttaatacagaaggcgtgtactctgaaccccaccccattggcacccgttacctcacccgtcccctgtaa

SEQ ID NO: 1092 - DNA, 2211 bp, Artificial Sequence
  source: /note="Description of Artificial Sequence: Synthetic polynucleotide"
atggctgccgatggttatcttccagattggctcgaggacaacctctctgagggcattcgcgagtggtgggcgctgaaacctggagccccgaagcccaaagccaaccagcaaaagcaggacgacggccggggtctggtgcttcctggctacaagtacctcggacccttcaacggactcgacaaaggagagccggtcaacgaggcggacgcggcagccctcgaacacgacaaagcttacgaccagcagctcaaggccggtgacaacccctacctcaagtataaccacgccgacgccgagtttcaggagcgtctgcaagaagatacgtcttttgggggcaacctcgggcgagcagtcttccaggccaaaaagaggcttcttgaacctcttggtctggttgaggaagcggctaagacggctcctggaaagaagaggcctgtagagcagtctcctcaggaaccggactcctccgcgggtattggcaaatcgggtgcacagcccgctaaaaagagactcaatttcggtcagactggcgacacagagtcagtcccagacccacaacctctcggagaacctccagcaacccccgctgctgtgggacctactacaatggcttcaggcggtggcgcaccaatggcggacaataacgaaggcgccgatggagtgggtaatgcctcaggaaattggcattgcgattccacatggctgggcgacagagtcatcaccaccagcacccgaacatgggccttgcccacctataacaaccacctctacaagcaaatctccagtgcttcaacgggggccagcaacgacaaccactacttcggctacagcaccccctgggggtattttgacttcaacagattccactgccacttctcaccacgtgactggcagcgactcatcaacaacaactggggattccggcccaagagactcagcttcaagctcttcaacatccaggtcaaggaggtcacgcagaatgaaggcaccaagaccatcgccaataacctcaccagcaccatccaggtgtttacggactcggagtaccagctgccgtacgttctcggctccgcccaccagggctgcctgcctccgttcccggcggacgtgttcatgattccccagtacggctacctaacactcaacaacggtagtcaggccgtgggacgctcctccttctactgcctggaatactttccttcgcagatgctgagaaccggcaacaacttccagtttacttacaccttcgaggacgtgcctttccacagcagctacgcccacagccagagcttggaccggctgatgaatcctctgattgaccagtacctgtactacttgtctcggactcaaacaacaggaggcacggcaaatacgcagactctgggcttcagccaaggtgggcctaatacaatggccaatcaggcaaagaactggctgccaggaccctgttaccgccaacaacgcgtctcaacgacaaccgggcaaaacaacaatagcaactttgcctggactgctgggaccaaataccatctgaatggaagaaattcattggctaatcctggcatcgctatggcaacacacaaagacgacaaggagcgtttttttcccagtaacgggatcctgatttttggcaaacaaaatgctgccagagacaatgcggattacagcgatgtcatgctcaccagcgaggaagaaatcaaaaccactaaccctgtggctacagaggaatacggtatcgtggcagataacttgcagcagcaaaacacggctcctcaaattggaactgtcaacagccagggggccttacccggtatggtctggcagaaccgggacgtgtacctgcagggtcccatctgggccaagattcctcacacggacggcaacttccacccgtctccgctgatgggcggctttggcctgaaacatcctccgcctcagatcctgatcaagaacacgcctgtacctgcggatcctccgaccaccttcaaccagtcaaagctgaactctttcatcacgcaatacagcaccggacaggtcagcgtggaaattgaatgggagctgcagaaggaaaacagcaagcgctggaaccccgagatccagtacacctccaactactacaaatctacaagtgtggactttgctgttaatacagaaggcgtgtactctgaaccccaccccattggcacccgttacctcacccgtcccctgtaa

SEQ ID NO: 1093 - DNA, 2211 bp, Artificial Sequence
  source: /note="Description of Artificial Sequence: Synthetic polynucleotide"
atggctgccgatggttatcttccagattggctcgaggacactctctctgaaggaataagacagtggtggaagctcaaacctggcccaccaccaccaaagcccgcagagcggcataaggacgacagcaggggtcttgtgcttcctgggtacaagtacctcggacccttcaacggactcgacaagggagagccggtcaacgaggcagacgccgcggccctcgagcacgacaaagcctacgaccagcagctccaagcgggtgacaatccgtacctgcggtataaccacgccgacgccgagtttcaggagcgtcttcaaggagatacgtcttttgggggcaacctcggacgagcagtcttccaggccaaaaagaggcttcttgaacctcttggtctggttgaggaagcggctaagacggctcctggaaagaagaggcctgtagagcagtctcctcaggaaccggactcctccgcgggtattggcaaatcgggtgcacagcccgctaaaaagagactcaatttcggtcagactggcgacacagagtcagtcccagaccctcaaccaatcggagaacctcccgcagccccctcaggtgtgggatctcttacaatggcttcaggtggtggcgcaccagtggcagacaataacgaaggtgccgatggagtgggtagttcctcgggaaattggcattgcgattcccaatggctgggggacagagtcatcaccaccagcacccgaacatgggccttgcccacctataacaaccacctctacaagcaaatctccagtgcttcaacgggggccagcaacgacaaccactacttcggctacagcaccccctgggggtattttgacttcaaccgcttccactgccacttctcaccacgtgactggcagcgactcatcaacaacaactggggattccggcccaagagactcagcttcaagctcttcaacatccaggtcaaggaggtcacgcagaatgaaggcaccaagaccatcgccaataacctcaccagcaccatccaggtgtttacggactcggagtaccagctgccgtacgttctcggctctgcccaccagggctgcctgcctccgttcccggcggacgtgttcatgattccccagtacggctacctaacactcaacaacggtagtcaggccgtgggacgctcctccttctactgcctggaatactttccttcgcagatgctgagaaccggcaacaacttccagtttacttacaccttcgaggacgtgcctttccacagcagctacgcccacagccagagcttggaccggctgatgaatcctctgattgaccagtacctgtactacttgtctcggactcaaacaacaggaggcacggcaaatacgcagactctgggcttcagccaaggtgggcctaatacaatggccaatcaggcaaagaactggctgccaggaccctgttaccgccaacaacgcgtctcaacgacaaccgggcaaaacaacaatagcaactttgcctggactgctgggaccaaataccatctgaatggaagaaattcattggctaatcctggcatcgctatggcaacacacaaagacgacaaggagcgtttttttcccagtaacgggatcctgatttttggcaaacaaaatgctgccagagacaatgcggattacagcgatgtcatgctcaccagcgaggaagaaatcaaaaccactaaccctgtggctacagaggaatacggtatcgtggcagataacttgcagcagcaaaacacggctcctcaaattggaactgtcaacagccagggggccttacccggtatggtctggcagaaccgggacgtgtacctgcagggtcccatctgggccaagattcctcacacggacggcaacttccacccgtctccgctgatgggcggctttggcctgaaacatcctccgcctcagatcctgatcaagaacacgcctgtacctgcggatcctccgaccaccttcaaccagtcaaagctgaactctttcatcacgcaatacagcaccggacaggtcagcgtggaaattgaatgggagctgcagaaggaaaacagcaagcgctggaaccccgagatccagtacacctccaactactacaaatctacaagtgtggactttgctgttaatacagaaggcgtgtactctgaaccccaccccattggcacccgttacctcacccgtcccctgtaa

SEQ ID NO: 1094 - DNA, 2217 bp, Artificial Sequence
  source: /note="Description of Artificial Sequence: Synthetic polynucleotide"
atggctgccgatggttatcttccagattggctcgaggacaacctctctgagggaataagacagtggtggaagctcaaacctggcccaccaccaccaaagcccgcagagcggcataaggacgacagcaggggtcttgtgcttcctgggtacaagtacctcggacccttcaacggactcgacaagggagagccggtcaacgcggcggacgcagcggccctcgagcacgacaaggcctacgaccagcagctcaaagcgggtgacaatccgtacctgcggtataaccacgccgacgccgagtttcaggagcgtctgcaagaagatacgtcttttgggggcaacctcgggcgagcagtcttccaggccaagaagcgggttctcgaacctctcggtctggttgaggaaggcgctaagacggctcctggaaagaagagaccggtagagccatcaccccagcgttctccagactcctctacgggcatcggcaagaaaggccagcagcccgctaaaaagagactcaattttggtcagactggcgactcagagtcagtccccgacccacaacctctcggagaacctccagcaacccccgctgctgtgggacctactacaatggcttcaggcggtggcgcaccaatggcagacaataacgaaggcgccgacggagtgggtaatgcctcaggaaattggcattgcgattccacatggctgggggacagagtcatcaccaccagcacccgaacctgggccctgcccacctacaacaaccacctctacaagcaaatctccaacgggacttcgggaggaagcaccaacgacaacacctacttcggctgcgtcacgccctgggggtattttgactttaacaaattccactgccacttttcaccggatgactggcaacgactcatcaacaacggctggggattccggactaagcgactcaacttcaagctcttcagcatgaaagtcaaaaagggtacggacaacactggaatcaagaccatcgcgaataaccttaccaacacggtccatgtcttcgcggactcggagtaccagttgccgtacgtcctcggctctgcgcaccagggctgcctccctccgttcccggcggacgtgttcatgattccgcagtacggctacctaacgctcaacaatggcagccaggcagtgggacggtcatccttttactgcctggaatatttcccatcgcagatgctgagaacgggcaacaactttaccttcagctacacctttgaggacgttcctttccacagcagctacgctcacagccagagtctggaccgtctcatgaatcctctgattgaccagtacctgtactacttgtctcggactcaaacaacaggaggcacggcaaatacgcagactctgggcttcagccaaggtgggcctaatacaatggccaatcaggcaaagaactggctgccaggaccctgttaccgccaacaacgcgtctcaacgacaaccgggcaaaacaacaatagcaactttgcctggactgctgggaccaaataccatctgaatggaagaaattcattggctaatcctggcatcgctatggcaacacacaaagacgacaaggagcgtttttttcccagtaacgggatcctgatttttggcaaacaaaatgctgccagagacaatgcggattacagcgatgtcatgctcaccagcgaggaagaaatcaaaaccactaaccctgtggctacagaggaatacggtatcgtggcagataacttgcagcagcaaaacacggctcctcaaattggaactgtcaacagccagggggccttacccggtatggtctggcagaaccgggacgtgtacctgcagggtcccatctgggccaagattcctcacacggacggcaacttccacccgtctccgctgatgggcggctttggcctgaaacatcctccgcctcagatcctgatcaagaacacgcctgtacctgcggatcctccgaccaccttcaaccagtcaaagctgaactctttcatcacgcaatacagcaccggacaggtcagcgtggagatcgagtgggagctgcagaaggaaaacagcaagcgctggaacccggagatccagtacacctccaactactacaaatctacaagtgtggactttgctgttaatacagaaggcgtgtactctgaaccccaccccattggcacccgttacctcacccgtcccctgtaa

SEQ ID NO: 1095 - DNA, 2214 bp, Artificial Sequence
  source: /note="Description of Artificial Sequence: Synthetic polynucleotide"
atggctgccgatggttatcttccagattggctcgaggacactctctctgaaggaataagacagtggtggaagctcaaacctggcccaccaccaccaaagcccgcagagcggcataaggacgacagcaggggtcttgtgcttcctgggtacaagtacctcggacccttcaacggactcgacaagggggagcccgtcaacgcggcggacgcagcggccctcgagcacgacaaggcctacgaccagcagctcaaagcgggtgacaatccgtacctgcggtataaccacgccgacgccgagtttcaggagcgtctgcaagaagatacgtcttttgggggcaacctcgggcgagcagtcttccaggccaagaagcgggttctcgaacctctcggtctggttgaggaaggcgctaagacggctcctggaaagaagagaccggtagagccatcaccccagcgttctccagactcctctacgggcatcggcaagaaaggccagcagcccgcgaaaaagagactcaactttgggcagactggcgactcagagtcagtgcccgaccctcaaccaatcggagaaccccccgcaggcccctctggtctgggatctggtacaatggctgcaggcggtggcgctccaatggcagacaataacgaaggcgccgatggagtgggtagttcctcgggaaattggcattgcgattccacatggctgggggacagagtcatcaccaccagcacccgaacctgggccctgcccacctacaacaaccacctctacaaacaaatttccagcgcttcaacgggagcctcgaacgacaatcactactttggctacagcaccccctgggggtattttgacttcaacagattccactgccacttctcaccacgtgactggcagcgactcatcaacaacaactggggattccggcctaagcgactcaacttcaagctcttcaacattcaggtcaaagaggttacggacaacaatggagtcaagaccatcgccaataaccttaccagcacggtccaggtcttcacggactcggagtaccagttgccgtacgtcctcggctctgcgcaccagggctgcctccctccgttcccggcggacgtgttcatgattccgcagtacggctacctaacgctcaacaatggcagccaggcagtgggacggtcatccttttactgcctggaatatttcccatcgcagatgctgagaacgggcaacaactttaccttcagctacacctttgaggacgttcctttccacagcagctacgctcacagccagagtctggaccgtctcatgaatcctctgattgaccagtacctgtactacttgtctcggactcaaacaacaggaggcacggcaaatacgcagactctgggcttcagccaaggtgggcctaatacaatggccaatcaggcaaagaactggctgccaggaccctgttaccgccaacaacgcgtctcaacgacaaccgggcaaaacaacaatagcaactttgcctggactgctgggaccaaataccatctgaatggaagaaattcattggctaatcctggcatcgctatggcaacacacaaagacgacaaggagcgtttttttcccagtaacgggatcctgatttttggcaaacaaaatgctgccagagacaatgcggattacagcgatgtcatgctcaccagcgaggaagaaatcaaaaccactaaccctgtggctacagaggaatacggtatcgtggcagataacctgcagcagcaaaacacggctcctcaaattggaactgtcaacagccagggggccttacccggtatggtctggcagaaccgggacgtgtacctgcagggtcccatctgggccaagattcttcacacggacggcaactttcacccttctccgctgatgggagggtttggaatgaagcacccgcctcctccgatcctgatcaagaacacgcctgtacctgcggatcctccgaccaccttcaaccagtcaaagctgaactctttcatcacgcaatacagcaccggacaggtcagcgtggaaattgaatgggagctgccgaaggaaaacagcaagcgctggaaccccgagatccagtacacctccaactactacaaatctacaagtgtggactttgctgttaatacagaaggtgtgtactatgaaccccaccccattggcacccgttacctcacccctcccctgtaa

SEQ ID NO: 1096 - DNA, 2214 bp, Artificial Sequence
  source: /note="Description of Artificial Sequence: Synthetic polynucleotide"
atggctgccgatggttatcttccagattggctcgaggacaacctctctgagggcattcgcgagtggtgggcgctgaaacctggagccccgaagcccaaagccaaccagcaaaagcaggacgacggccggggtctggtgcttcctggctacaagtacctcggacccttcaacggactcgacaagggggagcccgtcaacgcggcggacgcagcggccctcgagcacgacaaggcctacgaccagcagctcaaagcgggtgacaatccgtacctgcggtataaccacgccgacgccgagtttcaggagcgtctgcaagaagatacgtcttttgggggcaacctcgggcgagcagtcttccaggccaagaagcgggttctcgaacctctcggtctggttgaggaaggcgctaagacggctcctggaaagaagagaccggtagagccatcaccccagcgctctccagactcctctacgggcatcggcaagaaaggccaacagcccgccagaaaaagactcaattttggtcagactggcgactcagagtcagttccagaccctcaacctctcggagaacctccagcagcgccctctggtgtggcacctaatacaatggctgcaggcggtggcgcaccaatggcagacaataacgaaggcgccgacggagtgggtaatgcctcaggaaattggcattgcgattccacatggctgggcgacagagtcatcaccaccagcacccgaacatgggccttgcccacctataacaaccacctctacaagcaaatctccagtgcttcaacgggggccagcaacgacaaccactacttcggctacagcaccccctgggggtattttgatttcaacagattccactgccacttttcaccacgtgactggcagcgactcatcacaacaattgggggattccggcctaagcgactcaacttcaagctcttcaacattcaggtcaaagaggttacggacaacaatggagtcaagaccatcgccaataaccttaccagcacggtccaggtcttcacggactcggagtaccagttgccgtacgtcctcggctctgcgcaccagggctgcctccctccgttcccggcggacgtgttcatgattccgcagtacggctacctaacgctcaacaatggcagccaggcagtgggacggtcatccttttactgcctggaatatttcccatcgcagatgctgagaacgggcaacaactttaccttcagctacacctttgaggacgttcctttccacagcagctacgctcacagccagagtctggaccggctgatgaatcctctgattgaccagtacctgtactacttgtctcggactcaaacaacaggaggcacggcaaatacgcagactctgggcttcagccaaggtgggcctaatacaatggccaatcaggcaaagaactggctgccaggaccctgttaccgccaacaacgcgtctcaacgacaaccgggcaaaacaacaatagcaactttgcctggactgctgggaccaaataccatctgaatggaagaaattcattggctaatcctggcatcgctatggcaacacacaaagacgacaaggagcgtttttttcccagtaacgggatcctgatttttggcaaacaaaatgctgccagagacaatgcggattacagcgatgtcatgctcaccagcgaggaagaaatcaaaaccactaaccctgtggctacagaggaatacggtatcgtggcagataacttgcagcagcaaaacacggctcctcaaattggaactgtcaacagccagggggccttacccggtatggtctggcagaaccgggacgtgtacctgcagggtcccatctgggccaagattcctcacacggacggcaacttccacccgtctccgctgatgggcggctttggcctgaaacatcctccgcctcagatcctgatcaagaacacgcctgtacctgcggatcctccgaccaccttcaaccagtcaaagctgaactctttcatcacgcaatacagcaccggacaggtcagcgtggaaattgaatgggagctgcagaaggaaaacagcaagcgctggaaccccgagatccagtacacctccaactactacaaatctacaagtgtggactttgctgttaatacagaaggcgtgtactctgaaccccaccccattggcacccgttacctcacccgtcccctgtaa

SEQ ID NO: 1097 - DNA, 2211 bp, Artificial Sequence
  source: /note="Description of Artificial Sequence: Synthetic polynucleotide"
atggctgccgatggttatcttccagattggctcgaggacactctctctgaaggaataagacagtggtggaagctcaaacctggcccaccaccaccaaagcccgcagagcggcataaggacgacggccggggtctggtgcttcctggctacaagtacctcggacccttcaacggactcgacaagggggagcccgtcaacgcggcggacgcagcggccctcgagcacgacaaggcctacgaccagcagctcaaagcgggtgacaatccgtacctgcggtataaccacgccgacgccgagtttcaggagcgtctgcaagaagatacgtcttttgggggcaacctcggacgagcagtcttccaggcgaaaaagagggttcttgaacctctgggcctggttgaggaacctgttaagacggctccgggaaaaaagaggccggtagagcagtcgccacaagagccagactcctcctcgggcatcggcaagaaaggccagcagcccgctaaaaagagactcaattttggtcagactggcgactcagagtcagtccccgacccacaacctctcggagaacctccagcaacccccgctgctgtgggacctactacaatggcttcaggcggtggcgcaccaatggcagacaataacgaaggcgccgacggagtgggtaatgcctcaggaaattggcattgcgattccacatggatgggcgacagagtcatcaccaccagcacccgaacatgggccttgcccacctataacaaccacctctacaagcaaatctccagtgcttcaacgggggccagcaacgacaaccactacttcggctacagcaccccctgggggtattttgactttaacagattccactgccacttttcaccacgtgactggcagcgactcatcaacaacaactggggattccggcctaagcgactcaacttcaagctcttcaacattcaggtcaaggaggtcacgcagaatgaaggcaccaagaccatcgccaataacctcaccagcaccatccaggtgtttacggactcggagtaccagctgccgtacgttctcggctccgcccaccagggctgcctgcctccgttcccggcggacgtgttcatgatcccccagtacggctacctaacactcaacaacggtagtcaggccgtgggacgctcctccttctactgcctggaatactttccttcgcagatgctgagaaccggcaacaacttccagtttacttacaccttcgaggacgtgcctttccacagcagctacgcgcacagccagagcttggaccggctgatgaatcctctgattgaccagtacctgtactacttgtctcggactcaaacaacaggaggcacggcaaatacgcagactctgggcttcagccaaggtgggcctaatacaatggccaatcacgcaaagaactggctgccaggaccctgttaccgccaacaacgcgtctcaacgacaaccgggcaaaacaacaatagcaactttgcctggactgctgggaccaaataccatctgaatggaagaaattcattggctaatcctggcatcgctatggcaacacacaaagacgacaaggagcgtttttttcccagtaacgggatcctgatttttggcaaacaaaatgctgccagagacaatgcggattacagcgatgtcatgctcaccagcgaggaagaaatcaaaaccactaaccctgtggctacagaggaatacggtatcgtggcagataacttgcagcagcaaaacacggctcctcaaattggaactgtcaacagccagggggccttacccggtatggtctggcagaaccgggacgtgtacctgcagggtcccatctgggccaagattcctcacacggacggcaacttccacccgtctccgctgatgggcggcttcggcctgaaacatcctccgcctcagatcctgatcaagaacacgcctgtacctgcggatcctccgaccaccttcaaccagtcaaagctgaactctttcatcacgcaatacagcaccggacaggtcagcgtggaaattgaatgggagctgcagaaggaaaacagcaagcgctggaaccccgagatccagtacacctccaactactacaaatctacaagtgtggactttgctgttaatacagaaggcgtgtactctgaaccccaccccattggcacccgttacctcacccgtcccctgtaa

SEQ ID NO: 1098 - DNA, 2214 bp, Artificial Sequence
  source: /note="Description of Artificial Sequence: Synthetic polynucleotide"
atggctgccgatggttatcttccagattggctcgaggacaacctctctcagggcattcgcgagtggtgggacttgaaacctggagccccgaaacccaaagccaaccagcaaaagcaggacgacggccggggtctggtgcttcctggctacaagtacctcggacccttcaacggactcgacaagggggagcccgtcaacgcggcggacgcagcggccctcgagcacgacaaggcctacgaccagcagctcaaagcgggtgacaatccgtacctgcggtataaccacgccgacgccgagtttcaggagcgtctgcaagaagatacgtcttttgggggcaacctcggacgagcagtcttccaggccaagaagcgggttctcgaacctctcggtctggttgaggaaggcgctaagacggctcctggaaagaagagaccggtagagccatcaccccagcgttctccagactcctctacgggcatcggcaagaaaggccaacagcccgccagaaaaagactcaattttggtcagactggcgactcagagtcagttccagaccctcaacctctcggagaacctccagcagcgcccgctgctgtgggacctactacaatggcttcaggcggtggcgcaccaatggcagacaataacgaaggcgccgacggagtgggtagttcctcgggaaattggcattgcgattcccaatggctgggggacagagtcatcaccaccagcacccgaacctgggccctgcccacctacaacaaccacctctacaagcaaatctccagtgcttcaacgggggccagcaacgacaaccactacttcggctacagcaccccctgggggtattttgacttcaacagattccactgccacttttcaccacgtgactggcaaagactcatcaacaacaactggggattccggcccaagagactcagcttcaagctcttcaacatccaggtcaaggaggtcacgcagaatgaaggcaccaagaccatcgccaataacctcaccagcaccatccaggtgtttacggactcggagtaccagctgccgtacgttctcggctctgcccaccagggctgcctgcctccgttcccggcggacgtgttcatgattccccagtacgggtacctgactctgaacaatggcagtcaggccgtgggccgttcctccttctactgcctggagtactttccttctcaaatgctgagaaccggcaacaacttccagtttacttacaccttcgaggacgtgcctttccacagcagctacgcccacagccagagcttggaccggctgatgaatcctctgattgaccagtacctgtactacttgtctcggactcaaacaacaggaggcacgacaaatgcgcagactctgggcttcagccaaggtgggcctaatacaatggccaatcaggcaaagaactggctgccaggaccctgttaccgccaacaacgcgtctcaacgacaaccgggcaaaacaacaatagcaactttgcctggactgctgggaccaaataccatctgaatggaagaaattcattggctaatcctggcatcgctatggcaacacacaaagacgacaaggagcgtttttttcccagtaacgggatcctgatttttggcaaacaaaatgctgccagagacaatgcggattacagcgatgtcatgctcaccagcgaggaagaaatcaaaaccactaaccctgtggctacagaggaatacggtatcgtggcagataacttgcagcagcaaaacacggctcctcaaattggaactgtcaacagccagggggccttacccggtatggtctggcagaaccgggacgtgtacctgcagggtcccatctgggccaagattcctcacacggacggcaacttccacccgtctccgctgatgggcggctttggcctgaaacatcctccgcctcagatcctgatcaagaacacgcctgtacctgcggatcctccgaccaccttcaaccagtcaaagctgaactctttcatcacacagtactccacgggacaggtcagcgtggaaattgaatgggagctgcagaaggaaaacagcaagcgctggaacccggagatccagtacacttccaactactacaaatctacaaatgtggactttgctgttaacacagaaggcgtgtactctgaaccccaccccattggcacccgttacctcacccgtcccctgtaa

SEQ ID NO: 1099 - DNA, 2211 bp, Artificial Sequence
  source: /note="Description of Artificial Sequence: Synthetic polynucleotide"
atggctgccgatggttatcttccagattggctcgaggacaacctctctgagggcattcgcgagtggtgggacttgaaacctggagccccgaaacccaaagccaaccagcaaaagcaggacgacggccggggtctggtgcttcctggctacaagtacctcggacccttcaacggactcgacaagggggagcccgtcaacgcggcggacgcagcggccctcgagcacgacaaggcctacgaccagcagctcaaagcgggtgacaatccgtacctgcggtataaccacgccgacgccgagtttcaggagcgtctgcaagaagatacgtcttttgggggcaacctcgggcgagcagtcttccaggccaagaagagggttctcgaaccttttggtctggttgaggaaggcgctaagacggctcctggaaagaaacgtccggtagagcagtcgccacaagagccagactcctcctcgggcatcggcaagacaggccagcagcccgctaaaaagagactcaatttcggtcagactggcgacacagagtcagtcccagaccctcaaccaatcggagaacctcccgcagccccctcaggtgtgggacctaatacaatggctgcaggcggtggcgcaccaatggcagacaataacgaaggcgccgacggagtgggtagttcctcgggaaattggcattgcgattccacatggatgggtgacagagtcatcaccaccagcacccgaacctgggccctgcccacctacaataaccacctctacaagcaaatctccagtgcttcaacgggggccagcaacgacaaccactacttcggctacagcaccccctgggggtattttgacttcaacagattccactgccacttctcaccacgtgactggcagcgactcatcaacaacaactggggattccggcctaagcgactcaacttcaagctcttcaacattcaggtcaaggaggtcacgcagaatgaaggcaccaagaccatcgccaataacctcaccagcaccatccaggtgtttacggactcggagtaccagctgccgtacgttctcggctctgcccaccagggctgcctgcctccgttcccggcggacgtgttcatgattccccagtacggctacctaacactcaacaacggtagtcaggccgtgggacgctcctccttctactgcctggaatactttccttcgcagatgctgagaaccggcaacaacttccagtttacttacaccttcgaggacgtgcctttccacagcagctacgcccacagccagagcttggaccggctgatgaatcctctgattgaccagtacctgtactacttgtctcggactcaaacaacaggaggcacggcaaatacgcagactctgggcttcagccaaggtgggcctaatacaatggccaatcaggcaaagaactggctgccaggaccctgttaccgccaacaacgcgtctcaacgacaaccgggcaaaacaacaatagcaactttgcctggactgctgggaccaaataccatctgaatggaagaaattcattggctaatcctggcatcgctatggcaacacacaaagacgacaaggagcgtttttttcccagtaacgggatcctgatttttggcaaacaaaatgctgccagagacaatgcggattacagcgatgtcatgctcaccagcgaggaagaaatcaaaaccactaaccctgtggctacagaggaatacggtatcgtggcagataacttgcagcagcaaaacacggctcctcaaattggaactgtcaacagccagggggccttacccggtatggtctggcagaaccgggacgtgtacctgcagggtcccatctgggccaagattcctcacacggacggcaacttccacccgtctccgctgatgggcggctttggcctgaaacatcctccgcctcagatcctgatcaagaacacgcctgtacctgcggatcctccgaccaccttcaaccagtcaaagctgaactctttcatcacacagtactccacgggacaggtcagcgtggaaattgaatgggagctgcagaaggaaaacagcaagcgctggaacccggagatccagtacacttccaactactacaaatctacaaatgtggactttgctgttaacacagaaggcgtgtactctgaaccccaccccattggcacccgttacttcacccgtcccctgtaa

SEQ ID NO: 1100 - DNA, 2211 bp, Artificial Sequence
  source: /note="Description of Artificial Sequence: Synthetic polynucleotide"
atggctgccgatggttatcttccagattggctcgaggacaacctctctgagggcattcgcgagtggtgggacttgaaacctggagccccgaaacccaaagccaaccagcaaaagcaggacgacggccggggtctggtgcttcctggctacaagtacctcggacccttcaacggactcgacaagggggagcccgtcaacgcggcggacgcagcggccctcgagcacgacaaggcctacgaccagcagctcaaagcgggtgacaatccgtacctgcggtataaccacgccgacgccgagtttcaggagcgtctgcaagaagatacgtcttttgggggcaacctcgggcgagcagtcttccaggccaagaagcgggttctcgaacctctcggtctggttgaggaaggcgctaagacggctcctggaaagaaacgtccggtagagcagtcgccacaagagccagactcctcctcgggcatcggcaagacaggccagcagcccgctaaaaaaagactcaattttggtcagactggcgactcagagtcagttccagaccctcaacctctcggagaacctccagcaacccccgctgctgtgggacctactacaatggcttcaggtggtggcgcaccaatggcagacaataacgagggcgccgacggagtgggtaattcctcgggaaattggcattgcgattccacatggatgggcgacagagtcatcaccaccagcacccgaacctgggccctgcccacctacaacaatcacctctacaagcaaatctccagtgcttcaacgggggccagcaacgacaaccactacttcggctacagcaccccctgggggtattttgacttcaacagattccactgccacttctcaccacgtgactggcagcgactcatcaacaacaactggggattccggcctaagcgactcaacttcaagctcttcaacattcaggtcaaagaggttacggacaacaatggagtcaagaccatcgccaataaccttaccagcacggtccaggtcttcacggactcggagtaccagttgccgtacgtcctcggctctgcgcaccagggctgcctccctccgttcccggcggacgtgttcatgattccgcagtacggctacctaacgctcaacaacggtagtcaggccgtgggacgctcctccttctactgcctggaatactttccttcgcagatgctgagaaccggcaacaacttccagtttacttacaccttcgaggacgtgcctttccacagcagctacgcccacagccagagcttggaccggctgatgaatcctctgattgaccagtacctgtactacttgtctcggactcaaacaacaggaggcacggcaaatacgcagactctgggcttcagccaaggtgggcctaatacaatggccaatcaggcaaagaactggctgccaggaccctgttaccgccaacaacgcgtctcgacgacaaccgggcaaaacaacaatagcaactttgcctggactgctgggaccaaataccatctgaatggaagaaattcattggctaatcctggcatcgctatggcaacacacaaagacgacaaggagcgtttttttcccagtaacgggatcctgatttttggcaaacaaaatgctgccagagacaatgcggattacagcgatgtcatgctcaccagcgaggaagaaatcaaaaccactaaccctgtggctacagaggaatacggtatcgtggcagataacttgcagcagcaaaacacggctcctcaaattggaactgtcaacagccagggggccttacccggtatggtttggcagaaccgggacgtgtacctgcagggtcccatctgggccaagattcctcacacggacggcaacttccacccgtctccgctgatgggcggctttggcctgaaacatcctccgcctcagatcctgatcaagaacacgcctgtacctgcggatcctccgaccaccttcaaccagtcaaagctgaactctttcatcacacagtactccacgggacaggtcagcgtggaaattgaatgggagctgcagaaggaaaacagcaagcgctggaacccggagatccagtacacttccaactactacaaatctacaaatgtggactttgctgttaacacagaaggcgtgtactctgaaccccaccccattggcacccgttacctcacccgtcccctgtaa

SEQ ID NO: 1101 - DNA, 2211 bp, Artificial Sequence
  source: /note="Description of Artificial Sequence: Synthetic polynucleotide"
atggctgccgatggttatcttccagattggctcgaggacaacctctctgagggcattcgcgagtggtgggacttgaaacctggagccccgaagcccaaagccaaccagcaaaagcaggacgacggccggggtctggtgcttcctggctacaagtacctcggacccttcaacggactcgacaagggggagcccgtcaacgcggcggacgcagcggccctcgagcacgacaaggcctacgaccagcagctcaaagcgggtgacaatccgtacctgcggtataaccacgccgacgccgagtttcaggagcgtctgcaagaagatacgtcttttgggggcaacctcgggcgagcagtcttccaggccaagaagcgggttctcgaacctctcggtctggttgaggaaggcgctaagacggctcctggaaagaaacgtccggtagagcagtcaccacaagagccagactcctcctcgggcatcggcaagacaggccagcagcccgctaaaaagagactcaattttggtcagactggcgactcagagtcagtccccgacccacaacctctcggagaacctccagcaacccccgctgctgtgggacctactacaatggcttcaggcggtggcgcaccaatggcggacaataacgaaggcgccgatggagtgggtaatgcctcaggaaattggcattgcgattccacatggctgggcgacagagtcatcaccaccagcacccgaacatgggccttgcccacctataacaaccacctctacaagcaaatctccagtgcttcaacgggggccagcaacgacaaccactacttcggctacagcaccccctgggggtattttgactttaacagattccactgccacttctcaccacgtgactggcagcgactcatcaacaacaactggggattccggcccaagagactcaacttcaagctcttcaacatccaggtcaaggaggtcacgcagaatgaaggcaccaagaccatcgccaataacctcaccagcaccatccaggtgtttacggactcggagtaccagctgccgtacgttctcggctctgcccaccagggctgcctgcctccgttcccggcggacgtgttcatgattccccagtacggctacctgactctgaacaatggcagtcaggccgtgggccgttcctccttctactgcctagagtactttccttctcaaatgctgagaacgggcaacaactttgagttcagctaccagtttgaggacgtgccttttcacagcagctacgcgcacagccaaagcctggaccggctgatgaatcctctgattgaccagtacctgtactacttgtctcggactcaaacaacaggaggcacggcaaatacgcagactctgggcttcagccaaggtgggcctaatacaatggccaatcaggcaaagaactggctgccaggaccctgttaccgccaacaacgcgtctcaacgacaaccgggcaaaacaacaatagcaactttgcctggactgctgggaccaaataccatatgaatggaagaaattcattggttaatcctggcatcgctatggcaacacacaaagacgacaaggagcgtttttttcccagtaacgggatcctgatttttggcaaacaaaatgttgccagagacaatgcggattacagcgatgtcatgctcaccagcgaggaagaaatcaaaaccactaaccctgtggctacagaggaatacggtattgtggcagataacttgcagcagcaaaacacggctcctcaaattggaactgtcaacagccagggggccttacccggtatggtctggcagaaccgggacgtgtacctgcagggtcccatctgggccaagattcctcacacggacggcaacttccacccgtcgccgctgatgggcggctttggcctgaaacatcctccgcctcagatcctgatcaagaacacgcctgtacctgcggatcctccgaccaccttcaaccagtcaaagctgaactctttcatcacgcaatacagcaccggacaggtcagcgtggaaattgaatgggagctgcagaaggaaaacagcaagcgctggaaccccgagatccagtacacctccaactactacaaatctacaagtgtggactttgctgttaatacagaaggcgtgtactctgaaccccaccccattggcacccgttacctcacccgtcccctgtaa

SEQ ID NO: 1102 - protein, 736 aa, Artificial Sequence
  source: /note="Description of Artificial Sequence: Synthetic polypeptide"
MAADGYLPDWLEDTLSEGIRQWWKLKPGPPPPKPAERHKDDSRGLVLPGYKYLGPFNGLDKGEPVNEADAAALEHDKAYDRQLDSGDNPYLKYNHADAEFQERLKEDTSFGGNLGRAVFQAKKRVLEPLGLVEEPVKTAPGKKRPVEQSPQEPDSSSGIGKKGQQPAKKRLNFGQTGDSESVPDPQPLGEPPATPAAVGPTTMASGGGAPMADNNEGADGVGNASGNWHCDSTWMGDRVITTSTRTWALPTYNNHLYKQISSASTGASNDNHYFGYSTPWGYFDFNRFHCHFSPRDWQRLINNNWGFRPKRLNFRLFNIQVKEVTDNNGVKTIANNLTSTVQVFTDSEYQLPYVLGSAHQGCLPPFPADVFMIPQYGYLTLNNGSQAVGRSSFYCLEYFPSQMLRTGNNFTFSYTFEEVPFHSSYAHSQSLDRLMNPLIDQYLYYLSRTQTTGGTANTQTLGFSQGGPNTMANQAKNWLPGPCYRQQRVSTTTGQNNNSNFAWTAGTKYHLNGRNSLANPGIAMATHKDDKERFFPSNGILIFGKQNAARDNADYSDVMLTSEEEIKTTNPVATEEYGIVADNLQQQNTAPQIGTVNSQGALPGMVWQNRDVYLQGPIWAKIPHTDGNFHPSPLMGGFGLKHPPPQILIKNTPVPADPPTTFNQSKLNSFITQYSTGQVSVEIEWELQKENSKRWNPEIQYTSNYYKSTSVDFAVNTEGVYSEPHPIGTRYLTRPL

SEQ ID NO: 1103 - protein, 736 aa, Artificial Sequence
  source: /note="Description of Artificial Sequence: Synthetic polypeptide"
MAADGYLPDWLEDNLSEGIREWWDLKPASPKPKANQQKQDDGRGLVLPGYKYLGPFNGLDKGEPVNAADAAALEHDKAYDQQLKAGDNPYLRYNHADAEFQERLQEDTSFGGNLGRAVFQAKKRLLEPLGLVEEAAKTAPGKKRPVEQSPQEPDSSAGIGKSGAQPAKKRLNFGQTGGTESVPDPQPLGEPPAAPSGVGPNTMAAGGGAPMADNNEGADGVGSSSGNWHCDSTWLGDRVITTSTRTWALPTYNNHLYKQISSASTGASNDNHYFGYSTPWGYFDFNRFHCHFSPRDWQRLINNNWGFRPKRLSFKLFNIQVKEVTQNEGTKTIANNLTSTIQVFTDSEYQLPYVLGSAHQGCLPPFPADVFMIPQYGYLTLNNGSQAVGRSSFYCLEYFPSQMLRTGNNFQFTYTFEDVPFHSSYAHSQSLDRLMNPLIDQYLYYLSRTQTTGGTANTQTLGFSQGGPNTMANQAKNWLPGPCYRQQRVSTTTGQNNNSNFAWTAGTKYHLNGRNSLANPGIAMATHKDDKERFFPSNGILIFGKQNAARDNADYSDVMLTSEEEIKTTNPVATEEYGIVADNLQQQNTAPQIGTVNSQGALPGMVWQNRDVYLQGPIWAKIPHTDGNFHPSPLMGGFGLKHPPPQILIKNTPVPADPPTTFNQSKLNSFITQYSTGQVSVEIEWELQKENSKRWNPEIQYTSNYYKSTSVDFAVNTEGVYSEPHPIGTRYLTRPL

SEQ ID NO: 1104 - protein, 736 aa, Artificial Sequence; identical to SEQ ID NO: 1043
  source: /note="Description of Artificial Sequence: Synthetic polypeptide"

SEQ ID NO: 1105 - protein, 736 aa, Artificial Sequence
  source: /note="Description of Artificial Sequence: Synthetic polypeptide"
MAADGYLPDWLEDNLSEGIREWWDLEPGAPKPKANQQKQDDGRGLVLPGYKYLGPFNGLDKGEPVNAADAAALEHDKAYDQQLKAGDNPYLRYNHADAEFQERLQEDTSFGGNLGRAVFQAKKRVLEPLGLVEEGAKTAPGKKRPVEQSPQEPDSSSGIGKTGQQPAKKRLNFGQTGDSESVPDPQPLGEPPATPAAVGPTTMASGGGAPMADNNEGADGVGNASGNWHCDSTWLGDRVITTSTRTWALPTYNNHLYKQISSASTGASNDNHYFGYSTPWGYFDFNRFHCHFSPRDWQRLINNNWGFRPKRLNFKLFNIQVKEVTDNNGVKTIANNLTSTVQVFTDSEYQLPYVLGSAHQGCLPPFPADVFMIPQYGYLTLNNGSQAVGRSSFYCLEYFPSQMLRTGNNFQFTYTFEDVPFHSSYAHSQSLDRLMNPLIDQYLYYLSRTQTTGGTANTQTLGFSQGGPNTMANQAKNWLPGPCYRQQRVSTTTGQNNNSNFAWTAGTKYHLNGRNSLANPGIAMATHKDDKERFFPSNGILIFGKQNAARDNADYSDVMLTSEEEIKTTNPVATEEYGIVADNLQQQNTAPQIGTVNSQGALPGMVWQNRDVYLQGPIWAKIPHTDGNFHPSPLMGGFGLKHPPPQILIKNTPVPADPPTTFNQSKLNSFITQYSTGQVSVEIEWELQKENSKRWNPEIQYTSNYYKSTSVDFAVNTEGVYSEPHPIGTRYLTRPL

SEQ ID NO: 1106 - protein, 736 aa, Artificial Sequence; identical to SEQ ID NO: 1043
  source: /note="Description of Artificial Sequence: Synthetic polypeptide"

SEQ ID NO: 1107 - protein, 736 aa, Artificial Sequence
  source: /note="Description of Artificial Sequence: Synthetic polypeptide"
MAADGYLPDWLEDTLSEGIRQWWKLKPGPPPPKPAERHKDDSRGLVLPGYKYLGPFNGLDKGEPVNEADAAALEHDKAYDRQLDSGDNPYLKYNHADAEFQERLKEDTSFGGNLGRAVFQAKKRVLEPLGLVEEPVKTAPGKKRPVEQSPQEPDSSSGIGKKGQQPAKKRLNFGQTGDSESVPDPQPLGEPPATPAAVGPTTMASGGGAPMADNNEGADGVGNASGNWHCDSTWLGDRVITTSTRTWALPTYNNHLYKQISSASTGASNDNHYFGYSTPWGYFDFNRFHCHFSPRDWQRLINNNWGFRPKRLNFKLFNIQVKEVTDNNGVKTIANNLTSTVQVFTDSDYQLPYVLGSAHQGCLPPFPADVFMIPQYGYLTLNNGSQAVGRSSFYCLEYFPSQMLRTGNNFQFTYTFEDVPFHSSYAHSQSLDRLMNPLIDQYLYYLSRTQTTGGTANTQTLGFSQGGPNTMANQAKNWLPGPCYRQQRVSTTTGQNNNSNFAWTAGTKYHLNGRNSLANPGIAMATHKDDKERFFPSNGILIFGKQNAARDNADYSDVMLTSEEEIKTTNPVATEEYGIVADNLQQQNTAPQIGTVNSQGALPGMVWQNRDVYLQGPIWAKIPHTDGNFHPSPLMGGFGLKHPPPQILIKNTPVPADPPTTFNQSKLNSFITQYSTGQVSVEIEWELQKENSKRWNPEIQYTSNYYKSTSVDFAVNTEGVYSEPHPIGTRYLTRPL

SEQ ID NO: 1108 - protein, 734 aa, Artificial Sequence
  source: /note="Description of Artificial Sequence: Synthetic polypeptide"
MAADGYLPDWLEDTLSEGIRQWWKLKPGPPPPKPAERHKDDSRGLVLPGYKYLGPFNGLDKGEPVNEADAAALEHDKAYDQQLQAGDNPYLRYNHADAEFQERLQGDTSFGGNLGRAVFQAKKRLLEPLGLVEEAAKTAPGKKRPVEQSPQEPDSSAGIGKSGAQPAKKRLNFGQTGDTESVPDPQPIGEPPAAPSGVGSLTMASGGGAPVADNNEGADGVGSSSGNWHCDSQWLGDRVITTSTRTWALPTYNNHLYKQISSASTGASNDNHYFGYSTPWGYFDFNRFHCHFSPRDWQRLINNNWGFRPKRLSFKLFNHPGQGGHAERHQDHRQPHQHIQVFTDSEYQLPYVLGSAHQGCLPPFPADVFMIPQYGYLTLNNGSQAVGRSSFYCLEYFPSQMLRTGNNFQFTYTFEDVPFHSSYAHSQSLDRLMNPLIDQYLYYLSRTQTTGGTANTQTLGFSQGGPNTMANQAKNWLPGPCYRQQRVSTTTGQNNNSNFAWTAGTKYHLNGRNSLGNPGIAMATHKDDKERFFPSNGILIFGKQNAARDNADYSDVMLTSEEEIKTTNPVATEEYGIVADNLQQQNTAPQIGTVNSQGALPGMVWQNRDVYLQGPIWAKIPHTDGNFHPSPLMGGFGLKHPPPQILIKNTPVPADPPTAFNQSKLNSFITQYSTGQVSVEIEWELQKENSKRWNPEIQYTSNYYKSTSVDFAVNTEGVYSEPHPIGTRYLTRPL

SEQ ID NO: 1109 - protein, 737 aa, Artificial Sequence
  source: /note="Description of Artificial Sequence: Synthetic polypeptide"
MAADGYLPDWLEDNLSEGIREWWDLKHGAPKPKANQQKQDDGRGLVLPGYKYLGPFNGLDKGEPVNAADAAALEHDKAYDQQLKAGDNPYLRYNHADAEFQERLQEDTSFGGNLGRAVFQAKKRVLEPFGLVEEGAKTAPGKKRPVEQSPQEPDSSSGIGKTGQQPAKKRLNFGQTGDSESVPDPQPLGEPPATPAAVGPTTMASGGGAPMADNNEGADGVGNASGNWHCDSTWLGDRVITTSTRTWALPTYNNHLYKQISNGTSGGSTNDNTYFGYSTPWGYFDFNRFHCHFSPRDWQRLINNNWGFRPKRLNFKLFNIQVKEVTQNEGTKTIANNLTSTIQVFTDSEYQLPYVLGSAHQGCLPPFPADVFMIPQYGYLTLNNGSQAVGRSSFYCLEYFPSQMLRTGNNFTFSYTFEDVPFHSSYAHSQSLDRLMNPLIDQYLYYLSRTQTTGGTANTQTLGFSQGGPNTMANQAKNWLPGPCYRQQRVSTTTGQNNNSNFAWTAGTKYHLNGRNSLANPGIAMATHKDDKERFFPSNGILIFGKQNAARDNADYSDVMLTSEEEIKTTNPVATEEYGIVADNLQQQNTAPQIGTVNSQGALPGMVWQNRDVYLQGPIWAKIPHTDGNFHPSPLMGGFGLKHPPPQILIKNTPVPADPPTTFNQSKLNSFITQYSTGQVSVEIEWELQKENSKRWNPEIQYTSNYYKSTSVDFAVNTEGVYSDPHPIGTRYLTRPL

SEQ ID NO: 1110 - protein, 737 aa, Artificial Sequence
  source: /note="Description of Artificial Sequence: Synthetic polypeptide"
MAADGYLPDWLEDNLSEGIREWWALKPGAPKPKANQQKQDDGRGLVLPGYKYLGPFNGLDKGEPVNEADAAALEHDKAYDQQLKAGDNPYLRYNHADAEFQERLQEDTSFGGNLGRAVFQAKKRVLEPLGLVEEGAKTAPGKKRPVEPSPQRSPDSSTGIGKKGQQPARKRLNFGQTGDSESVPDPQPLGEPPAAPSGVGPNTMASGGGAPMADNNEGADGVGNSSGNWHCDSTWMGDRVITTSTRTWALPTYNNHLYKQISSASTGASNDNHYFGYSTPWGYFDFNRFHCHFSPRDWQRLINNNWGFRPKRLNFKLFNIQVKEVTQNEGTKTIANNLTSTIQVFTDSEYQLPYVLGSAHQGCLPPFPADVFMIPQYGYLTLNNGSQAVGRSSFYCLEYFPSQMLRTGNNFQFTYTFEDVPFHSSYAHSQSLDRLMNPLIDQYLYYLSRTQTTGGTANTQTLGFSQGGPNTMANQAKNWLPGPCYRQQRVSTTTGQNNNSNFAWTAGTKYHLNGRNSLANPGIAMATHKDDKERFFPSNGILIFGKQNAARDNADYSDVMLTSEEEIKTTNPVATEEYGIVADNLQQQNTAPQIGTVNSQGALPGMVWQNRDVYLQGPIWAKIPHTDGNFHPSPLMGGFGLKHPPPQILIKNTPVPADPPTTFNQSKLNSFITQYSTGQVSVEIEWELQKENSKRWNPEIQYTSNYYKSTSVDFAVNTEGVYSEPHPIGTRYLTRPL

SEQ ID NO: 1111 - protein, 736 aa, Artificial Sequence
  source: /note="Description of Artificial Sequence: Synthetic polypeptide"
  MOD_RES (226)..(226): Any naturally occurring amino acid
MAADGYLPDWLEDTLSEGIRQWWKLKPGPPPPKPAERHKDDSRGLVLPGYKYLGPFNGLDKGEPVNEADAAALEHDKAYDRQLDSGDNPYLKYNHADAEFQERLKEDTSFGGNLGRAVFQAKKRVLEPLGLVEEPVKTAPGKKRPVEQSPQEPDSSSGIGKKGQQPAKKRLNFGQTGDSESVPDPQPLGEPPATPAAVGPTTMASGGGAPMADNNEGADGVGNASXNWHCDSTWLGDRVITTSTRTWALPPITTTSTSKSPVLQRGRSNDNHYFGYSTPWGYFDFNRFHCHFSPRDWQRLINNNWGFRPKRLNFKLFNIQVKEVTDNNGVKTIANNLTSTVQVFTDSDYQLPYVLGSAHQGCLPPFPADVFMIPQYGYLTLNNGSQAVGRSSFYCLEYFPSQMLRTGNNFQFTYTFEDVPFHSSYAHSQSLDRLMNPLIDQYLYYLSRTQTTGGTANTQTLGFSQGGPNTMANQAKNWLPGPCYRQQRVSTTTGQNNNSNFAWTAGTKYHLNGRNSLANPGIAMATHKDDKERFFPSNGILIFGKQNAARDNADYSDVMLTSEEEIKTTNPVATEEYGIVADNLQQQNTAPQIGTVNSQGALPGMVWQNRDVYLQGPIWAKIPHTDGNFHPSPLMGGFGLKHPPPQILIKNTPVPADPPTTFNQSKLNSFITQYSTGQVSVEIEWELQKENSKRWNPEIQYTSNYYKSTNVDFAVNTEGVYSEPHPIGTRYLTRPL

SEQ ID NO: 1112 - protein, 736 aa, Artificial Sequence
  source: /note="Description of Artificial Sequence: Synthetic polypeptide"
  MOD_RES (239)..(239): Any naturally occurring amino acid
MAADGYLPDWLEDNLSEGIREWWDLKPGAPKPKANQQKQDDGRGLVLPGYKYLGPFNGLDKGEPVNAADAAALEHDKAYDQQLQAGDNPYLRYNHADAEFQERLQGDTSFGGNLGRAVFQAKKRVLEPLGLVEEAAKTAPGKKRPVEQSPQEPDSSAGIGKSGAQPAKKRLNFGQTGDTESVPDPQPIGEPPAAPSGVGPNTMAAGGGAPMADNNEGADGVGSSSGNWHCDSTWLGDRXITTSTRTWALPTYNNHLYKQISSASTGASNDNHYFGYSTPWGYFDFNRFHCHFSPRDWQRLINNNWGFRPKRLNFKLFNIQVKEVTDNNGVKTIANNLTSTVQVFTDSEYQLPYVLGSAHQGCLPPFPADVFMIPQYGYLTLNNGSQAVGRSSFYCLEYFPSQMLRTGNNFTFSYTFEDVPFHSSYAHSQSLDRLMNPLIDQYLYYLSRTQTTGGTANTQTLGFSQGGPNTMANQAKNWLPGPCYRQQRVSTTTGQNNNSNFAWTAGTKYHLNGRNSLANPGIAMATHKDDKERFFPSNGILIFGKQNAARDNADYSDVMLTSEEEIKTTNPVATEEYGIVADNFQQQNTAPQIGTVNSQGALPGMVWQNRDVYLQGPIWAKIPHTDGNFHPSPLMGGFGLKHPPPQILIKNTPVPADPPTTFNQSKLNSFITQYSTGQVSVEIEWELQKENSKRWNPEIQYTSNYYKSTSVDFAVNTEGVYSEPHPIGTRYLTRPL

SEQ ID NO: 1113 - protein, 736 aa, Artificial Sequence
  source: /note="Description of Artificial Sequence: Synthetic polypeptide"
MAADGYLPDWLEDNLSEGIREWWALKPGAPKPKANQQKQDDGRGLVLPGYKYLGPFNGLDKGEPVNEADAAALEHDKAYDQQLKAGDNPYLKYNHADAEFQERLQEDTSFGGNLGRAVFQAKKRLLEPLGLVEEAAKTAPGKKRPVEQSPQEPDSSAGIGKSGAQPAKKRLNFGQTGDTESVPDPQPLGEPPATPAAVGPTTMASGGGAPMADNNEGADGVGNASGNWHCDSTWLGDRVITTSTRTWALPTYNNHLYKQISSASTGASNDNHYFGYSTPWGYFDFNRFHCHFSPRDWQRLINNNWGFRPKRLSFKLFNIQVKEVTQNEGTKTIANNLTSTIQVFTDSEYQLPYVLGSAHQGCLPPFPADVFMIPQYGYLTLNNGSQAVGRSSFYCLEYFPSQMLRTGNNFQFTYTFEDVPFHSSYAHSQSLDRLMNPLIDQYLYYLSRTQTTGGTANTQTLGFSQGGPNTMANQAKNWLPGPCYRQQRVSTTTGQNNNSNFAWTAGTKYHLNGRNSLANPGIAMATHKDDKERFFPSNGILIFGKQNAARDNADYSDVMLTSEEEIKTTNPVATEEYGIVADNLQQQNTAPQIGTVNSQGALPGMVWQNRDVYLQGPIWAKIPHTDGNFHPSPLMGGFGLKHPPPQILIKNTPVPADPPTTFNQSKLNSFITQYSTGQVSVEIEWELQKENSKRWNPEIQYTSNYYKSTSVDFAVNTEGVYSEPHPIGTRYLTRPL

SEQ ID NO: 1114 - protein, 736 aa, Artificial Sequence
  source: /note="Description of Artificial Sequence: Synthetic polypeptide"
MAADGYLPDWLEDTLSEGIRQWWKLKPGPPPPKPAERHKDDSRGLVLPGYKYLGPFNGLDKGEPVNEADAAALEHDKAYDQQLQAGDNPYLRYNHADAEFQERLQGDTSFGGNLGRAVFQAKKRLLEPLGLVEEAAKTAPGKKRPVEQSPQEPDSSAGIGKSGAQPAKKRLNFGQTGDTESVPDPQPIGEPPAAPSGVGSLTMASGGGAPVADNNEGADGVGSSSGNWHCDSQWLGDRVITTSTRTWALPTYNNHLYKQISSASTGASNDNHYFGYSTPWGYFDFNRFHCHFSPRDWQRLINNNWGFRPKRLSFKLFNIQVKEVTQNEGTKTIANNLTSTIQVFTDSEYQLPYVLGSAHQGCLPPFPADVFMIPQYGYLTLNNGSQAVGRSSFYCLEYFPSQMLRTGNNFQFTYTFEDVPFHSSYAHSQSLDRLMNPLIDQYLYYLSRTQTTGGTANTQTLGFSQGGPNTMANQAKNWLPGPCYRQQRVSTTTGQNNNSNFAWTAGTKYHLNGRNSLANPGIAMATHKDDKERFFPSNGILIFGKQNAARDNADYSDVMLTSEEEIKTTNPVATEEYGIVADNLQQQNTAPQIGTVNSQGALPGMVWQNRDVYLQGPIWAKIPHTDGNFHPSPLMGGFGLKHPPPQILIKNTPVPADPPTTFNQSKLNSFITQYSTGQVSVEIEWELQKENSKRWNPEIQYTSNYYKSTSVDFAVNTEGVYSEPHPIGTRYLTRPL

SEQ ID NO: 1115 - protein, 738 aa, Artificial Sequence
  source: /note="Description of Artificial Sequence: Synthetic polypeptide"
MAADGYLPDWLEDNLSEGIRQWWKLKPGPPPPKPAERHKDDSRGLVLPGYKYLGPFNGLDKGEPVNAADAAALEHDKAYDQQLKAGDNPYLRYNHADAEFQERLQEDTSFGGNLGRAVFQAKKRVLEPLGLVEEGAKTAPGKKRPVEPSPQRSPDSSTGIGKKGQQPAKKRLNFGQTGDSESVPDPQPLGEPPATPAAVGPTTMASGGGAPMADNNEGADGVGNASGNWHCDSTWLGDRVITTSTRTWALPTYNNHLYKQISNGTSGGSTNDNTYFGCVTPWGYFDFNKFHCHFSPDDWQRLINNGWGFRTKRLNFKLFSMKVKKGTDNTGIKTIANNLTNTVHVFADSEYQLPYVLGSAHQGCLPPFPADVFMIPQYGYLTLNNGSQAVGRSSFYCLEYFPSQMLRTGNNFTFSYTFEDVPFHSSYAHSQSLDRLMNPLIDQYLYYLSRTQTTGGTANTQTLGFSQGGPNTMANQAKNWLPGPCYRQQRVSTTTGQNNNSNFAWTAGTKYHLNGRNSLANPGIAMATHKDDKERFFPSNGILIFGKQNAARDNADYSDVMLTSEEEIKTTNPVATEEYGIVADNLQQQNTAPQIGTVNSQGALPGMVWQNRDVYLQGPIWAKIPHTDGNFHPSPLMGGFGLKHPPPQILIKNTPVPADPPTTFNQSKLNSFITQYSTGQVSVEIEWELQKENSKRWNPEIQYTSNYYKSTSVDFAVNTEGVYSEPHPIGTRYLTRPL

SEQ ID NO: 1116 - protein, 737 aa, Artificial Sequence
  source: /note="Description of Artificial Sequence: Synthetic polypeptide"
MAADGYLPDWLEDTLSEGIRQWWKLKPGPPPPKPAERHKDDSRGLVLPGYKYLGPFNGLDKGEPVNAADAAALEHDKAYDQQLKAGDNPYLRYNHADAEFQERLQEDTSFGGNLGRAVFQAKKRVLEPLGLVEEGAKTAPGKKRPVEPSPQRSPDSSTGIGKKGQQPAKKRLNFGQTGDSESVPDPQPIGEPPAGPSGLGSGTMAAGGGAPMADNNEGADGVGSSSGNWHCDSTWLGDRVITTSTRTWALPTYNNHLYKQISSASTGASNDNHYFGYSTPWGYFDFNRFHCHFSPRDWQRLINNNWGFRPKRLNFKLFNIQVKEVTDNNGVKTIANNLTSTVQVFTDSEYQLPYVLGSAHQGCLPPFPADVFMIPQYGYLTLNNGSQAVGRSSFYCLEYFPSQMLRTGNNFTFSYTFEDVPFHSSYAHSQSLDRLMNPLIDQYLYYLSRTQTTGGTANTQTLGFSQGGPNTMANQAKNWLPGPCYRQQRVSTTTGQNNNSNFAWTAGTKYHLNGRNSLANPGIAMATHKDDKERFFPSNGILIFGKQNAARDNADYSDVMLTSEEEIKTTNPVATEEYGIVADNLQQQNTAPQIGTVNSQGALPGMVWQNRDVYLQGPIWAKILHTDGNFHPSPLMGGFGMKHPPPPILIKNTPVPADPPTTFNQSKLNSFITQYSTGQVSVEIEWELPKENSKRWNPEIQYTSNYYKSTSVDFAVNTEGVYYEPHPIGTRYLTPPL

SEQ ID NO: 1117 - protein, 737 aa, Artificial Sequence
  source: /note="Description of Artificial Sequence: Synthetic polypeptide"
MAADGYLPDWLEDNLSEGIREWWALKPGAPKPKANQQKQDDGRGLVLPGYKYLGPFNGLDKGEPVNAADAAALEHDKAYDQQLKAGDNPYLRYNHADAEFQERLQEDTSFGGNLGRAVFQAKKRVLEPLGLVEEGAKTAPGKKRPVEPSPQRSPDSSTGIGKKGQQPARKRLNFGQTGDSESVPDPQPLGEPPAAPSGVAPNTMAAGGGAPMADNNEGADGVGNASGNWHCDSTWLGDRVITTSTRTWALPTYNNHLYKQISSASTGASNDNHYFGYSTPWGYFDFNRFHCHFSPRDWQRLITTIGGFRPKRLNFKLFNIQVKEVTDNNGVKTIANNLTSTVQVFTDSEYQLPYVLGSAHQGCLPPFPADVFMIPQYGYLTLNNGSQAVGRSSFYCLEYFPSQMLRTGNNFTFSYTFEDVPFHSSYAHSQSLDRLMNPLIDQYLYYLSRTQTTGGTANTQTLGFSQGGPNTMANQAKNWLPGPCYRQQRVSTTTGQNNNSNFAWTAGTKYHLNGRNSLANPGIAMATHKDDKERFFPSNGILIFGKQNAARDNADYSDVMLTSEEEIKTTNPVATEEYGIVADNLQQQNTAPQIGTVNSQGALPGMVWQNRDVYLQGPIWAKIPHTDGNFHPSPLMGGFGLKHPPPQILIKNTPVPADPPTTFNQSKLNSFITQYSTGQVSVEIEWELQKENSKRWNPEIQYTSNYYKSTSVDFAVNTEGVYSEPHPIGTRYLTRPL

SEQ ID NO: 1118 - protein, 736 aa, Artificial Sequence
  source: /note="Description of Artificial Sequence: Synthetic polypeptide"
MAADGYLPDWLEDTLSEGIRQWWKLKPGPPPPKPAERHKDDGRGLVLPGYKYLGPFNGLDKGEPVNAADAAALEHDKAYDQQLKAGDNPYLRYNHADAEFQERLQEDTSFGGNLGRAVFQAKKRVLEPLGLVEEPVKTAPGKKRPVEQSPQEPDSSSGIGKKGQQPAKKRLNFGQTGDSESVPDPQPLGEPPATPAAVGPTTMASGGGAPMADNNEGADGVGNASGNWHCDSTWMGDRVITTSTRTWALPTYNNHLYKQISSASTGASNDNHYFGYSTPWGYFDFNRFHCHFSPRDWQRLINNNWGFRPKRLNFKLFNIQVKEVTQNEGTKTIANNLTSTIQVFTDSEYQLPYVLGSAHQGCLPPFPADVFMIPQYGYLTLNNGSQAVGRSSFYCLEYFPSQMLRTGNNFQFTYTFEDVPFHSSYAHSQSLDRLMNPLIDQYLYYLSRTQTTGGTANTQTLGFSQGGPNTMANHAKNWLPGPCYRQQRVSTTTGQNNNSNFAWTAGTKYHLNGRNSLANPGIAMATHKDDKERFFPSNGILIFGKQNAARDNADYSDVMLTSEEEIKTTNPVATEEYGIVADNLQQQNTAPQIGTVNSQGALPGMVWQNRDVYLQGPIWAKIPHTDGNFHPSPLMGGFGLKHPPPQILIKNTPVPADPPTTFNQSKLNSFITQYSTGQVSVEIEWELQKENSKRWNPEIQYTSNYYKSTSVDFAVNTEGVYSEPHPIGTRYLTRPL

SEQ ID NO: 1119 - protein, 737 aa, Artificial Sequence
  source: /note="Description of Artificial Sequence: Synthetic polypeptide"
MAADGYLPDWLEDNLSQGIREWWDLKPGAPKPKANQQKQDDGRGLVLPGYKYLGPFNGLDKGEPVNAADAAALEHDKAYDQQLKAGDNPYLRYNHADAEFQERLQEDTSFGGNLGRAVFQAKKRVLEPLGLVEEGAKTAPGKKRPVEPSPQRSPDSSTGIGKKGQQPARKRLNFGQTGDSESVPDPQPLGEPPAAPAAVGPTTMASGGGAPMADNNEGADGVGSSSGNWHCDSQWLGDRVITTSTRTWALPTYNNHLYKQISSASTGASNDNHYFGYSTPWGYFDFNRFHCHFSPRDWQRLINNNWGFRPKRLSFKLFNIQVKEVTQNEGTKTIANNLTSTIQVFTDSEYQLPYVLGSAHQGCLPPFPADVFMIPQYGYLTLNNGSQAVGRSSFYCLEYFPSQMLRTGNNFQFTYTFEDVPFHSSYAHSQSLDRLMNPLIDQYLYYLSRTQTTGGTTNAQTLGFSQGGPNTMANQAKNWLPGPCYRQQRVSTTTGQNNNSNFAWTAGTKYHLNGRNSLANPGIAMATHKDDKERFFPSNGILIFGKQNAARDNADYSDVMLTSEEEIKTTNPVATEEYGIVADNLQQQNTAPQIGTVNSQGALPGMVWQNRDVYLQGPIWAKIPHTDGNFHPSPLMGGFGLKHPPPQILIKNTPVPADPPTTFNQSKLNSFITQYSTGQVSVEIEWELQKENSKRWNPEIQYTSNYYKSTNVDFAVNTEGVYSEPHPIGTRYLTRPL

SEQ ID NO: 1120 - protein, 736 aa, Artificial Sequence
  source: /note="Description of Artificial Sequence: Synthetic polypeptide"
MAADGYLPDWLEDNLSEGIREWWDLKPGAPKPKANQQKQDDGRGLVLPGYKYLGPFNGLDKGEPVNAADAAALEHDKAYDQQLKAGDNPYLRYNHADAEFQERLQEDTSFGGNLGRAVFQAKKRVLEPFGLVEEGAKTAPGKKRPVEQSPQEPDSSSGIGKTGQQPAKKRLNFGQTGDTESVPDPQPIGEPPAAPSGVGPNTMAAGGGAPMADNNEGADGVGSSSGNWHCDSTWMGDRVITTSTRTWALPTYNNHLYKQISSASTGASNDNHYFGYSTPWGYFDFNRFHCHFSPRDWQRLINNNWGFRPKRLNFKLFNIQVKEVTQNEGTKTIANNLTSTIQVFTDSEYQLPYVLGSAHQGCLPPFPADVFMIPQYGYLTLNNGSQAVGRSSFYCLEYFPSQMLRTGNNFQFTYTFEDVPFHSSYAHSQSLDRLMNPLIDQYLYYLSRTQTTGGTANTQTLGFSQGGPNTMANQAKNWLPGPCYRQQRVSTTTGQNNNSNFAWTAGTKYHLNGRNSLANPGIAMATHKDDKERFFPSNGILIFGKQNAARDNADYSDVMLTSEEEIKTTNPVATEEYGIVADNLQQQNTAPQIGTVNSQGALPGMVWQNRDVYLQGPIWAKIPHTDGNFHPSPLMGGFGLKHPPPQILIKNTPVPADPPTTFNQSKLNSFITQYSTGQVSVEIEWELQKENSKRWNPEIQYTSNYYKSTNVDFAVNTEGVYSEPHPIGTRYFTRPL

SEQ ID NO: 1121 - protein, 736 aa, Artificial Sequence
  source: /note="Description of Artificial Sequence: Synthetic polypeptide"
MAADGYLPDWLEDNLSEGIREWWDLKPGAPKPKANQQKQDDGRGLVLPGYKYLGPFNGLDKGEPVNAADAAALEHDKAYDQQLKAGDNPYLRYNHADAEFQERLQEDTSFGGNLGRAVFQAKKRVLEPLGLVEEGAKTAPGKKRPVEQSPQEPDSSSGIGKTGQQPAKKRLNFGQTGDSESVPDPQPLGEPPATPAAVGPTTMASGGGAPMADNNEGADGVGNSSGNWHCDSTWMGDRVITTSTRTWALPTYNNHLYKQISSASTGASNDNHYFGYSTPWGYFDFNRFHCHFSPRDWQRLINNNWGFRPKRLNFKLFNIQVKEVTDNNGVKTIANNLTSTVQVFTDSEYQLPYVLGSAHQGCLPPFPADVFMIPQYGYLTLNNGSQAVGRSSFYCLEYFPSQMLRTGNNFQFTYTFEDVPFHSSYAHSQSLDRLMNPLIDQYLYYLSRTQTTGGTANTQTLGFSQGGPNTMANQAKNWLPGPCYRQQRVSTTTGQNNNSNFAWTAGTKYHLNGRNSLANPGIAMATHKDDKERFFPSNGILIFGKQNAARDNADYSDVMLTSEEEIKTTNPVATEEYGIVADNLQQQNTAPQIGTVNSQGALPGMVWQNRDVYLQGPIWAKIPHTDGNFHPSPLMGGFGLKHPPPQILIKNTPVPADPPTTFNQSKLNSFITQYSTGQVSVEIEWELQKENSKRWNPEIQYTSNYYKSTNVDFAVNTEGVYSEPHPIGTRYLTRPL

SEQ ID NO: 1122 - protein, 736 aa, Artificial Sequence
  source: /note="Description of Artificial Sequence: Synthetic polypeptide"
MAADGYLPDWLEDNLSEGIREWWDLKPGAPKPKANQQKQDDGRGLVLPGYKYLGPFNGLDKGEPVNAADAAALEHDKAYDQQLKAGDNPYLRYNHADAEFQERLQEDTSFGGNLGRAVFQAKKRVLEPLGLVEEGAKTAPGKKRPVEQSPQEPDSSSGIGKTGQQPAKKRLNFGQTGDSESVPDPQPLGEPPATPAAVGPTTMASGGGAPMADNNEGADGVGNASGNWHCDSTWLGDRVITTSTRTWALPTYNNHLYKQISSASTGASNDNHYFGYSTPWGYFDFNRFHCHFSPRDWQRLINNNWGFRPKRLNFKLFNIQVKEVTQNEGTKTIANNLTSTIQVFTDSEYQLPYVLGSAHQGCLPPFPADVFMIPQYGYLTLNNGSQAVGRSSFYCLEYFPSQMLRTGNNFEFSYQFEDVPFHSSYAHSQSLDRLMNPLIDQYLYYLSRTQTTGGTANTQTLGFSQGGPNTMANQAKNWLPGPCYRQQRVSTTTGQNNNSNFAWTAGTKYHMNGRNSLVNPGIAMATHKDDKERFFPSNGILIFGKQNVARDNADYSDVMLTSEEEIKTTNPVATEEYGIVADNLQQQNTAPQIGTVNSQGALPGMVWQNRDVYLQGPIWAKIPHTDGNFHPSPLMGGFGLKHPPPQILIKNTPVPADPPTTFNQSKLNSFITQYSTGQVSVEIEWELQKENSKRWNPEIQYTSNYYKSTSVDFAVNTEGVYSEPHPIGTRYLTRPL

SEQ ID NO: 1123 - DNA, 2217 bp, Artificial Sequence
  source: /note="Description of Artificial Sequence: Synthetic polynucleotide"
atggctgccgatggttatcttccagattggctcgaggacaacctctctgagggcattcgcgagtggtgggcgctgaaacctggagccccgaagcccaaagccaaccagcaaaagcaggacgacggccggggtctggtgcttcctggctacaagtacctcggacccttcaacggactcgacaagggggagcccgtcaacgcggcggacgcagcggccctcgagcacgacaaggcctacgaccagcagctgcaggcgggtgacaatccgtacctgcggtataaccacgccgacgccgagtttcaggagcgtctgcaagaagatacgtcttttgggggcaacctcgggcgagcagtcttccaggccaagaagcgggttctcgaacctctcggtctggttgaggaaggcgctaagacggctcctggaaagaagagaccggtagagccatcaccccagcgttctccagactcctctacgggcatcggcaagaaaggccaacagcccgccagaaaaagactcaattttggtcagactggcgactcagagtcagttccagaccctcaacctctcggagaacctccagcagcgccctctggtgtgggacctaatacaatggctgcaggcggtggcgcaccaatggcagacaataacgaaggcgccgacggagtgggtagttcctcgggaaattggcattgcgattccacatggctgggcgacagagtcatcaccaccagcacccgaacctgggccctgcccacctacaacaaccacctctacaagcaaatctccaacgggacatcgggaggagccaccaacgacaacacctacttcggctacagcaccccctgggggtattttgactttaacagattccactgccacttttcaccacgtgactggcagcgactcatcaacaacaactggggattccggcccaagagactcagcttcaagctcttcaacatccaggtcaaggaggtcacgcagaatgaaggcaccaagaccatcgccaataacctcaccagcaccatccaggtgtttacggactcggagtaccagctgccgtacgttctcggctctgcccaccagggctgcctgcctccgttcccggcggacgtgttcatgattccccagtacggctacctaacactcaacaacggtagtcaggccgtgggacgctcctccttctactgcctggaatactttccttcgcagatgctgagaaccggcaacaacttccagtttacttacaccttcgaggacgtgcctttccacagcagctacgcccacagccagagcttggaccggctgatgaatcctctgattgaccagtacctgtactacttgtctcggactcaaacaacaggaggcacggcaaatacgcagactctgggcttcagccaaggtgggcctaatacaatggccaatcaggcaaagaactggctgccaggaccctgttaccgccaacaacgcgtctcaacgacaaccgggcaaaacaacaatagcaactttgcctggactgctgggaccaaataccatctgaatggaagaaattcattggctaatcctggcatcgctatggcaacacacaaagacgacgaggagcgtttttttcccagtaacgggatcctgatttttggcaaacaaaatgctgccagagacaatgcggattacagcgatgtcatgctcaccagcgaggaagaaatcaaaaccactaaccctgtggctacagaggaatacggtatcgtggcagataacttgcagcagcaaaacacggctcctcaaattggaactgtcaacagccagggggccttacccggtatggtttggcagaaccgggacgtgtacctgcagggtcccatctgggccaagattcctcacacggacggcaacttccacccgtctccgctgatgggcggctttggcctgaaacatcctccgcctcagatcctgatcaagaacacgcctgtacctgcggatcctccgaccaccttcaaccagtcaaagctgaactctttcatcacgcaatacagcaccggacaggtcagcgtggaaattgaatgggagctgcagaaggaaaacagcaagcgctggaaccccgagatccagtacacctccaactactacaaatctacaagtgtggactttgctgttaatacagaaggcgtgtactctgaaccccgccccattggcacccgttacctcacccgtaatctgtaa

SEQ ID NO: 1124 - protein, 738 aa, Artificial Sequence; identical to SEQ ID NO: 114
  source: /note="Description of Artificial Sequence: Synthetic polypeptide"

SEQ ID NO: 1125 - protein, 735 aa, Artificial Sequence
  source: /note="Description of Artificial Sequence: Synthetic polypeptide"
MAADGYLPDWLEDNLSEGVREWWALQPGAPKPKANQQHQDNARGLVLPGYKYLGPGNGLDKGEPVNAADAAALEHDKAYDQQLKAGDNPYLKYNHADAEFQQRLQGDTSFGGNLGRAVFQAKKRVLEPLGLVEQAGETAPGKKRPLIESPQQPDSSTGIGKKGKQPAKKKLVFEDETGAGDGPPEGSTSGAMSDDSEMRAAAGGAAVEGGQGADGVGNASGDWHCDSTWSEGHVTTTSTRTWVLPTYNNHLYKRLGESLQSNTYNGFSTPWGYFDFNRFHCHFSPRDWQRLINNNWGMRPKAMRVKIFNIQVKEVTTSNGETTVANNLTSTVQIFADSSYELPYVMDAGQEGSLPPFPNDVFMVPQYGYCGLVTGNTSQQQTDRNAFYCLEYFPSQMLRTGNNFEITYSFEKVPFHSMYAHSQSLDRLMNPLIDQYLWGLQSTTTGTTLNAGTATTNFTKLRPTNFSNFKKNWLPGPSIKQQGFSKTANQNYKIPATGSDSLIKYETHSTLDGRWSALTPGPPMATAGPADSKFSNSQLIFAGPKQNGNTATVPGTLIFTSEEELAATNATDTDMWGNLPGGDQSNSNLPTVDRLTALGAVPGMVWQNRDIYYQGPIWAKIPHTDGHFHPSPLIGGFGLKHPPPQIFIKNTPVPANPATTFSSTPVNSFITQYSTGQVSVQIDWEIQKERSKRWNPEVQFTSNYGQQNSLLWAPDAAGKYTEPRAIGTRYLTHHL

SEQ ID NO: 1126 - protein, 735 aa, Artificial Sequence
  source: /note="Description of Artificial Sequence: Synthetic polypeptide"
MAADGYLPDWLEDNLSEGVREWWALQPGAPKPKANQQHQDNARGLVLPGYKYLGPGNGLDKGEPVNAADAAALEHDKAYDQQLKAGDNPYLKYNHADAEFQQRLQGDTSFGGNLGRAVFQAKKRVLEPLGLVEQAGETAPGKKRPLIESPQQPDSSTGIGKKGKQPAKKKLVFEDETGAGDGPPEGSTSGAMSDDSEMRAAAGGAAVEGGQGADGVGNASGDWHCDSTWSEGHVTTTSTRTWVLPTYNNHLYKRLGESLQSNTYNGFSTPWGYFDFNRFHCHFSPRDWQRLINNNWGMRPKAMRVKIFNIQVKEVTTSNGETTVANNLTSTVQIFADSSYELPYVMDAGQEGSLPPFPNDVFMVPQYGYCGLVTGNTSQQQTDRNAFYCLEYFPSQMLRTGNNFEITYSFEKVPFHSMYAHSQSLDRLMNPLIDQYLWGLQSTTTGTTLNAGTATTNFTKLRPTNFSNFKKNWLPGPSIKQQGFSKTANQNYLIPATGSDSLIRYETHSTLDGRWSALTPGPPMATAGPADSKFSNSQLIFAGPKQNGNTATVPGTLIFTSEEELAATNATDTDMWGNLPFRDLSSSNLPTVDRSTPLGAVPGMVWQNRDIYYQGPIWAKIPHTDGHFHPSPLIGGFGLKHPPPQIFIKNTPVPANPATTFSSTPVNSFITQYSTGQVSVQIDWEIQKERSKRWNPEVQFTSNYGQQNSLLWAPDAAGKYTEPRAIGTRYLTHHL

SEQ ID NO: 1127 - protein, 735 aa, Artificial Sequence
  source: /note="Description of Artificial Sequence: Synthetic polypeptide"
MAADGYLPDWLEDNLSEGVREWWALQPGAPKPKANQQHQDNARGLVLPGYKYLGPGNGLDKGEPVNAADAAALEHDKAYDQQLKAGDNPYLKYNHADAEFQQRLQGDTSFGGNLGRAVFQAKKRVLEPLGLVEQAGETAPGKKRPLIESPQQPDSSTGIGKKGKQPAKKKLVFEDETGAGDGPPEGSTSGAMSDDSEMRAAAGGAAVEGGQGADGVGNASGDWHCDSTWSEGHVTTTSTRTWVLPTYNNHLYKRLGESLQSNTYNGFSTPWGYFDFNRFHCHFSPRDWQRLINNNWGMRPKAMRVKIFNIQVKEVTTSNGETTVANNLTSTVQIFADSSYELPYVMDAGQEGSLPPFPNDVFMVPQYGYCGLVTGNTSQQQTDRNAFYCLEYFPSQMLRTGNNFEITYSFEKVPFHSMYAHSQSLDRLMNPLIDQYLWGLQSTTTGTTLNAGTATTNFTKLRPTNFSNFKKNWLPGPSIKQQGFSKTANQNYYIPATGSDSLILYETHSTLDGRWSALTPGPPMATAGPADSKFSNSQLIFAGPKQNGNTATVPGTLIFTSEEELAATNATDTDMWGNLPGGDQSNSNLPTVDRLTALGAVPGMVWQNRDIYYQGPIWAKIPHTDGHFHPSPLIGGFGLKHPPPQIFIKNTPVPANPATTFSSTPVNSFITQYSTGQVSVQIDWEIQKERSKRWNPEVQFTSNYGQQNSLLWAPDAAGKYTEPRAIGTRYLTHHL

SEQ ID NO: 1128 - protein, 735 aa, Artificial Sequence
  source: /note="Description of Artificial Sequence: Synthetic polypeptide"
MAADGYLPDWLEDNLSEGVREWWALQPGAPKPKANQQHQDNARGLVLPGYKYLGPGNGLDKGEPVNAADAAALEHDKAYDQQLKAGDNPYLKYNHADAEFQQRLQGDTSFGGNLGRAVFQAKKRVLEPLGLVEQAGETAPGKKRPLIESPQQPDSSTGIGKKGKQPAKKKLVFEDETGAGDGPPEGSTSGAMSDDSEMRAAAGGAAVEGGQGADGVGNASGDWHCDSTWSEGHVTTTSTRTWVLPTYNNHLYKRLGESLQSNTYNGFSTPWGYFDFNRFHCHFSPRDWQRLINNNWGMRPKAMRVKIFNIQVKEVTTSNGETTVANNLTSTVQIFADSSYELPYVMDAGQEGSLPPFPNDVFMVPQYGYCGLVTGNTSQQQTDRNAFYCLEYFPSQMLRTGNNFEITYSFEKVPFHSMYAHSQSLDRLMNPLIDQYLWGLQSTTTGTTLNAGTATTNFTKLRPTNFSNFKKNWLPGPSIKQQGFSKTANQNYGIPATGSDSLIKYETHSTLDGRWSALTPGPPIATAGPADSKFSNSQLIFAGPKQNGNTATVPGTLIFTSEEELAATNATDTDMWGNLPLYDASSSNLPTVDRLTLLGAVPGMVWQNRDIYYQGPIWAKIPHTDGHFHPSPLIGGFGLKHPPPQIFIKNTPVPANPATTFSSTPVNSFITQYSTGQVSVQIDWEIQKERSKRWNPEVQFTSNYGQQNSLLWAPDAAGKYTEPRAIGTRYLTHHL

SEQ ID NO: 1129 - protein, 735 aa, Artificial Sequence
  source: /note="Description of Artificial Sequence: Synthetic polypeptide"
MAADGYLPDWLEDNLSEGVREWWALQPGAPKPKANQQHQDNARGLVLPGYKYLGPGNGLDKGEPVNAADAAALEHDKAYDQQLKAGDNPYLKYNHADAEFQQRLQGDTSFGGNLGRAVFQAKKRVLEPLGLVEQAGETAPGKKRPLIESPQQPDSSTGIGKKGKQPAKKKLVFEDETGAGDGPPEGSTSGAMSDDSEMRAAAGGAAVEGGQGADGVGNASGDWHCDSTWSEGHVTTTSTRTWVLPTYNNHLYKRLGESLQSNTYNGFSTPWGYFDFNRFHCHFSPRDWQRLINNNWGMRPKAMRVKIFNIQVKEVTTSNGETTVANNLTSTVQIFADSSYELPYVMDAGQEGSLPPFPNDVFMVPQYGYCGLVTGNTSQQQTDRNAFYCLEYFPSQMLRTGNNFEITYSFEKVPFHSMYAHSQSLDRLMNPLIDQYLWGLQSTTTGTTLNAGTATTNFTKLRPTNFSNFKKNWLPGPSIKQQGFSKTANQNYTIPATGSDSLITYETHSTLDGRWSALTPGPPGATAGPADSKFSNSQLIFAGPKQNGNTATVPGTLIFTSEEELAATNATDTDMWGNLPRVDTSASNLPTVDRYTNLGAVPGMVWQNRDIYYQGPIWAKIPHTDGHFHPSPLIGGFGLKHPPPQIFIKNTPVPANPATTFSSTPVNSFITQYSTGQVSVQIDWEIQKERSKRWNPEVQFTSNYGQQNSLLWAPDAAGKYTEPRAIGTRYLTHHL

SEQ ID NO: 1130 - protein, 735 aa, Artificial Sequence
  source: /note="Description of Artificial Sequence: Synthetic polypeptide"
MAADGYLPDWLEDNLSEGVREWWALQPGAPKPKANQQHQDNARGLVLPGYKYLGPGNGLDKGEPVNAADAAALEHDKAYDQQLKAGDNPYLKYNHADAEFQQRLQGDTSFGGNLGRAVFQAKKRVLEPLGLVEQAGETAPGKKRPLIESPQQPDSSTGIGKKGKQPAKKKLVFEDETGAGDGPPEGSTSGAMSDDSEMRAAAGGAAVEGGQGADGVGNASGDWHCDSTWSEGHVTTTSTRTWVLPTYNNHLYKRLGESLQSNTYNGFSTPWGYFDFNRFHCHFSPRDWQRLINNNWGMRPKAMRVKIFNIQVKEVTTSNGETTVANNLTSTVQIFADSSYELPYVMDAGQEGSLPPFPNDVFMVPQYGYCGLVTGNTSQQQTDRNAFYCLEYFPSQMLRTGNNFEITYSFEKVPFHSMYAHSQSLDRLMNPLIDQYLWGLQSTTTGTTLNAGTATTNFTKLRPTNFSNFKKNWLPGPSIKQQGFSKTANQNYSIPATGSDSLIKYETHSTLDGRWSALTPGPPFATAGPADSKFSNSQLIFAGPKQNGNTATVPGTLIFTSEEELAATNATDTDMWGNLPDYDSSLSNLPTVDRDTTLGAVPGMVWQNRDIYYQGPIWAKIPHTDGHFHPSPLIGGFGLKHPPPQIFIKNTPVPANPATTFSSTPVNSFITQYSTGQVSVQIDWEIQKERSKRWNPEVQFTSNYGQQNSLLWAPDAAGKYTEPRAIGTRYLTHHL

SEQ ID NO: 1131 - protein, 735 aa, Artificial Sequence
  source: /note="Description of Artificial Sequence: Synthetic polypeptide"
MAADGYLPDWLEDNLSEGVREWWALQPGAPKPKANQQHQDNARGLVLPGYKYLGPGNGLDKGEPVNAADAAALEHDKAYDQQLKAGDNPYLKYNHADAEFQQRLQGDTSFGGNLGRAVFQAKKRVLEPLGLVEQAGETAPGKKRPLIESPQQPDSSTGIGKKGKQPAKKKLVFEDETGAGDGPPEGSTSGAMSDDSEMRAAAGGAAVEGGQGADGVGNASGDWHCDSTWSEGHVTTTSTRTWVLPTYNNHLYKRLGESLQSNTYNGFSTPWGYFDFNRFHCHFSPRDWQRLINNNWGMRPKAMRVKIFNIQVKEVTTSNGETTVANNLTSTVQIFADSSYELPYVMDAGQEGSLPPFPNDVFMVPQYGYCGLVTGNTSQQQTDRNAFYCLEYFPSQMLRTGNNFEITYSFEKVPFHSMYAHSQSLDRLMNPLIDQYLWGLQSTTTGTTLNAGTATTNFTKLRPTNFSNFKKNWLPGPSIKQQGFSKTANQNYSIPATGSDSLIWYETHSTLDGRWSALTPGPPCATAGPADSKFSNSQLIFAGPKQNGNTATVPGTLIFTSEEELAATNATDTDMWGNLPQGDSSLSNLPTVDRMTVLGAVPGMVWQNRDIYYQGPIWAKIPHTDGHFHPSPLIGGFGLKHPPPQIFIKNTPVPANPATTFSSTPVNSFITQYSTGQVSVQIDWEIQKERSKRWNPEVQFTSNYGQQNSLLWAPDAAGKYTEPRAIGTRYLTHHL

SEQ ID NO: 1132 - protein, 735 aa, Artificial Sequence
  source: /note="Description of Artificial Sequence: Synthetic polypeptide"
MAADGYLPDWLEDNLSEGVREWWALQPGAPKPKANQQHQDNARGLVLPGYKYLGPGNGLDKGEPVNAADAAALEHDKAYDQQLKAGDNPYLKYNHADAEFQQRLQGDTSFGGNLGRAVFQAKKRVLEPLGLVEQAGETAPGKKRPLIESPQQPDSSTGIGKKGKQPAKKKLVFEDETGAGDGPPEGSTSGAMSDDSEMRAAAGGAAVEGGQGADGVGNASGDWHCDSTWSEGHVTTTSTRTWVLPTYNNHLYKRLGESLQSNTYNGFSTPWGYFDFNRFHCHFSPRDWQRLINNNWGMRPKAMRVKIFNIQVKEVTTSNGETTVANNLTSTVQIFADSSYELPYVMDAGQEGSLPPFPNDVFMVPQYGYCGLVTGNTSQQQTDRNAFYCLEYFPSQMLRTGNNFEITYSFEKVPFHSMYAHSQSLDRLMNPLIDQYLWGLQSTTTGTTLNAGTATTNFTKLRPTNFSNFKKNWLPGPSIKQQGFSKTANQNYCIPATGSDSLIRYETHSTLDGRWSALTPGPPLATAGPADSKFSNSQLIFAGPKQNGNTATVPGTLIFTSEEELAATNATDTDMWGNLPYKDSSRSNLPTVDRETSLGAVPGMVWQNRDIYYQGPIWAKIPHTDGHFHPSPLIGGFGLKHPPPQIFIKNTPVPANPATTFSSTPVNSFITQYSTGQVSVQIDWEIQKERSKRWNPEVQFTSNYGQQNSLLWAPDAAGKYTEPRAIGTRYLTHHL

SEQ ID NO: 1133 - protein, 735 aa, Artificial Sequence
  source: /note="Description of Artificial Sequence: Synthetic polypeptide"
MAADGYLPDWLEDNLSEGVREWWALQPGAPKPKANQQHQDNARGLVLPGYKYLGPGNGLDKGEPVNAADAAALEHDKAYDQQLKAGDNPYLKYNHADAEFQQRLQGDTSFGGNLGRAVFQAKKRVLEPLGLVEQAGETAPGKKRPLIESPQQPDSSTGIGKKGKQPAKKKLVFEDETGAGDGPPEGSTSGAMSDDSEMRAAAGGAAVEGGQGADGVGNASGDWHCDSTWSEGHVTTTSTRTWVLPTYNNHLYKRLGESLQSNTYNGFSTPWGYFDFNRFHCHFSPRDWQRLINNNWGMRPKAMRVKIFNIQVKEVTTSNGETTVANNLTSTVQIFADSSYELPYVMDAGQEGSLPPFPNDVFMVPQYGYCGLVTGNTSQQQTDRNAFYCLEYFPSQMLRTGNNFEITYSFEKVPFHSMYAHSQSLDRLMNPLIDQYLWGLQSTTTGTTLNAGTATTNFTKLRPTNFSNFKKNWLPGPSIKQQGFSKTANQNYIIPATGSDSLIYYETHSTLDGRWSALTPGPPRATAGPADSKFSNSQLIFAGPKQNGNTATVPGTLIFTSEEELAATNATDTDMWGNLPWIDNSRSNLPTVDRPTSLGAVPGMVWQNKNIYYQGPIWAKIPHTDGHFHPSPLIGGFGLKHPPPQIFIKNTPVPANPATTFTSTPVNSFITQYSTGQVSVQIDWEIQKERSKRWNPEVQFTSNYGQQNSLLWAPDAAGKYTEPRAIGTRYLTHHL

SEQ ID NO: 1134 - protein, 735 aa, Artificial Sequence
  source: /note="Description of Artificial Sequence: Synthetic polypeptide"
MAADGYLPDWLEDNLSEGVREWWALQPGAPKPKANQQHQDNARGLVLPGYKYLGPGNGLDKGEPVNAADAAALEHDKAYDQQLKAGDNPYLKYNHADAEFQQRLQGDTSFGGNLGRAVFQAKKRVLEPLGLVEQAGETAPGKKRPLIESPQQPDSSTGIGKKGKQPAKKKLVFEDETGAGDGPPEGSTSGAMSDDSEMRAAAGGAAVEGGQGADGVGNASGDWHCDSTWSEGHVTTTSTRTWVLPTYNNHLYKRLGESLQSNTYNGFSTPWGYFDFNRFHCHFSPRDWQRLINNNWGMRPKAMRVKIFNIQVKEVTTSNGETTVANNLTSTVQIFADSSYELPYVMDAGQEGSLPPFPNDVFMVPQYGYCGLVTGNTSQQQTDRNAFYCLEYFPSQMLRTGNNFEITYSFEKVPFHSMYAHSQSLDRLMNPLIDQYLWGLQSTTTGTTLNAGTATTNFTKLRPTNFSNFKKNWLPGPSIKQQGFSKTANQNYGIPATGSDSLIIYETHSTLDGRWSALTPGPPRATAGPADSKFSNSQLIFAGPKQNGNTATVPGTLIFTSEEELAATNATDTDMWGNLPGGDQSNSNLPTVDRLTALGAVPGMVWQNRDIYYQGPIWAKIPHTDGHFHPSPLIGGFGLKHPPPQIFIKNTPVPANPATTFSSTPVNSFITQYSTGQVSVQIDWEIQKERSKRWNPEVQFTSNYGQQNSLLWAPDAAGKYTEPRAIGTRYLTHHL

SEQ ID NO: 1135 - protein, 735 aa, Artificial Sequence
  source: /note="Description of Artificial Sequence: Synthetic polypeptide"
MAADGYLPDWLEDNLSEGVREWWALQPGAPKPKANQQHQDNARGLVLPGYKYLGPGNGLDKGEPVNAADAAALEHDKAYDQQLKAGDNPYLKYNHADAEFQQRLQGDTSFGGNLGRAVFQAKKRVLEPLGLVEQAGETAPGKKRPLIESPQQPDSSTGIGKKGKQPAKKKLVFEDETGAGDGPPEGSTSGAMSDDSEMRAAAGGAAVEGGQGADGVGNASGDWHCDSTWSEGHVTTTSTRTWVLPTYNNHLYKRLGESLQSNTYNGFSTPWGYFDFNRFHCHFSPRDWQRLINNNWGMRPKAMRVKIFNIQVKEVTTSNGETTVANNLTSTVQIFADSSYELPYVMDAGQEGSLPPFPNDVFMVPQYGYCGLVTGNTSQQQTDRNAFYCLEYFPSQMLRTGNNFEITYSFEKVPFHSMYAHSQSLDRLMNPLIDQYLWGLQSTTTGTTLNAGTATTNFTKLRPTNFSNFKKNWLPGPSIKQQGFSKTANQNYVIPATESDSLIYYETHSTLDGRWSALTPGPPYATAGPADSKFSNSQLIFAGPKQNGNTATVPGTLIFTSEEELAATNATDTDMWGNLPPRDDSTSNLPTVDRKTYLGAVPGMVWQNRDIYYQGPIWAKIPHTDGHFHPSPLIGGFGLKHPPPQIFIKNTPVPANPATTFSSTPVNSFITQYSTGQVSVQIDWEIQKERSKRWNPEVQFTSNYGQQNSLLWAPDAAGKYTEPRAIGTRYLTHHL

SEQ ID NO: 1136 - protein, 735 aa, Artificial Sequence
  source: /note="Description of Artificial Sequence: Synthetic polypeptide"
MAADGYLPDWLEDNLSEGVREWWALQPGAPKPKANQQHQDNARGLVLPGYKYLGPGNGLDKGEPVNAADAAALEHDKAYDQQLKAGDNPYLKYNHADAEFQQRLQGDTSFGGNLGRAVFQAKKRVLEPLGLVEQAGETAPGKKRPLIESPQQPDSSTGIGKKGKQPAKKKLVFEDETGAGDGPPEGSTSGAMSDDSEMRAAAGGAAVEGGQGADGVGNASGDWHCDSTWSEGHVTTTSTRTWVLPTYNNHLYKRLGESLQSNTYNGFSTPWGYFDFNRFHCHFSPRDWQRLINNNWGMRPKAMRVKIFNIQVKEVTTSNGETTVANNLTSTVQIFADSSYELPYVMDAGQEGSLPPFPNDVFMVPQYGYCGLVTGNTSQQQTDRNAFYCLEYFPSQMLRTGNNFEITYSFEKVPFHSMYAHSQSLDRLMNPLIDQYLWGLQSTTTGTTLNAGTATTNFTKLRPTNFSNFKKNWLPGPSIKQQGFSKTANQNYYIPATGSDSLIIYETHSTLDGRWSALTPGPPIATAGPADSKFSNSQLIFAGPKQNGNTATVPGTLIFTSEEELAATNSTDTDMWGNLPTDDDSRSNLPTVDRMTLLGAVPGMVWQNRDIYYQGPIWAKIPHTDGHFHPSPLIGGFGLKHPPPQIFIKNTPVPANPATTFSSTPVNSFITQYSTGQVSVQIDWEIQKERSKRWNPEVQFTSNYGQQNSLLWAPDAAGKYTEPRAIGTRYLTHHL

SEQ ID NO: 1137 - protein, 735 aa, Artificial Sequence
  source: /note="Description of Artificial Sequence: Synthetic polypeptide"
MAADGYLPDWLEDNLSEGVREWWALQPGAPKPKANQQHQDNARGLVLPGYKYLGPGNGLDKGEPVNAADAAALEHDKAYDQQLKAGDNPYLKYNHADAEFQQRLQGDTSFGGNLGRAVFQAKKRVLEPLGLVEQAGETAPGKKRPLIESPQQPDSSTGIGKKGKQPAKKKLVFEDETGAGDGPPEGSTSGAMSDDSEMRAAAGGAAVEGGQGADGVGNASGDWHCDSTWSEGHVTTTSTRTWVLPTYNNHLYKRLGESLQSNTYNGFSTPWGYFDFNRFHCHFSPRDWQRLINNNWGMRPKAMRVKIFNIQVKEVTTSNGETTVANNLTSTVQIFADSSYELPYVMDAGQEGSLPPFPNDVFMVPQYGYCGLVTGNTSQQQTDRNAFYCLEYFPSQMLRTGNNFEITYSFEKVPFHSMYAHSQSLDRLMNPLIDQYLWGLQSTTTGTTLNAGTATTNFTKLRPTNFSNFKKNWLPGPSIKQQGFSKTANQNYHIPATGSDSLIYYETHSTLDGRWSALTPGPPSATAGPADSKFSNSQLIFAGPKQNGNTATVPGTLIFTSEEELAATNATDTDMWGNLPRRDSSVSNLPTVDRYTDLGAVPGMVWQNRDIYYQGPIWAKIPHTDGHFHPSPLIGGFGLKHPPPQIFIKNTPVPANPATTFSSTPVNSFITQYSTGQVSVQIDWEIQKERSKRWNPEVQFTSNYGQQNSLLWAPDAAGKYTEPRAIGTRYLTHHL

SEQ ID NO: 1138 - protein, 735 aa, Artificial Sequence
  source: /note="Description of Artificial Sequence: Synthetic polypeptide"
MAADGYLPDWLEDNLSEGVREWWALQPGAPKPKANQQHQDNARGLVLPGYKYLGPGNGLDKGEPVNAADAAALEHDKAYDQQLKAGDNPYLKYNHADAEFQQRLQGDTSFGGNLGRAVFQAKKRVLEPLGLVEQAGETAPGKKRPLIESPQQPDSSTGIGKKGKQPAKKKLVFEDETGAGDGPPEGSTSGAMSDDSEMRAAAGGAAVEGGQGADGVGNASGDWHCDSTWSEGHVTTTSTRTWVLPTYNNHLYKRLGESLQSNTYNGFSTPWGYFDFNRFHCHFSPRDWQRLINNNWGMRPKAMRVKIFNIQVKEVTTSNGETTVANNLTSTVQIFADSSYELPYVMDAGQEGSLPPFPNDVFMVPQYGYCGLVTGNTSQQQTDRNAFYCLEYFPSQMLRTGNNFEITYSFEKVPFHSMYAHSQSLDRLMNPLIDQYLWGLQSTTTGTTLNAGTATTNFTKLRPTNFSNFKKNWLPGPSIKQQGFSKTANQNYSIPATGSDSLISYETHSTLDGRWSALTPGPPRATAGPADSKFSNSQLIFAGPKQNGNTATVPGTLIFTSEEELAATNATDTDMWGNLPRHDSSLSNLPTVDRNTGLGAVPGMVWQNRDIYYQGPIWAKIPHTDGHFHPSPLIGGFGLKHPPPQIFIKNTPVPANPATTFSSTPVNSFITQYSTGQVSVQIDWEIQKERSKRWNPEVQFTSNYGQQNSLLWAPDAAGKYTEPRAIGTRYLTHHL

SEQ ID NO: 1139 - protein, 735 aa, Artificial Sequence
  source: /note="Description of Artificial Sequence: Synthetic polypeptide"
MAADGYLPDWLEDNLSEGVREWWALQPGAPKPKANQQHQDNARGLVLPGYKYLGPGNGLDKGEPVNAADAAALEHDKAYDQQLKAGDNPYLKYNHADAEFQQRLQGDTSFGGNLGRAVFQAKKRVLEPLGLVEQAGETAPGKKRPLIESPQQPDSSTGIGKKGKQPAKKKLVFEDETGAGDGPPEGSTSGAMSDDSEMRAAAGGAAVEGGQGADGVGNASGDWHCDSTWSEGHVTTTSTRTWVLPTYNNHLYKRLGESLQSNTYNGFSTPWGYFDFNRFHCHFSPRDWQRLINNNWGMRPKAMRVKIFNIQVKEVTTSNGETTVANNLTSTVQIFADSSYELPYVMDAGQEGSLPPFPNDVFMVPQYGYCGLVTGNTSQQQTDRNAFYCLEYFPSQMLRTGNNFEITYSFEKVPFHSMYAHSQSLDRLMNPLIDQYLWGLQSTTTGTTLNAGTATTNFTKLRPTNFSNFKKNWLPGPSIKQQGFSKTANQNYFIPATGSDSLIRYETHSTLDGRWSALTPGPPLATAGPADSKFSNSQLIFAGPKQNGNTATVPGTLIFTSEEELAATNATDTDMWGNLPVIDFSKSNLPTVDRLTHLGAVPGMVWQNRDIYYQGPIWAKIPHTDGHFHPSPLIGGFGLKHPPPQIFIKNTPVPANPATTFSSTPVNSFITQYSTGQVSVQIDWEIQKERSKRWNPEVQFTSNYGQQNSLLWAPDAAGKYTEPRAIGTRYLTHHL

SEQ ID NO: 1140 - protein, 735 aa, Artificial Sequence
  source: /note="Description of Artificial Sequence: Synthetic polypeptide"
MAADGYLPDWLEDNLSEGVREWWALQPGAPKPKANQQHQDNARGLVLPGYKYLGPGNGLDKGEPVNAADAAALEHDKAYDQQLKAGDNPYLKYNHADAEFQQRLQGDTSFGGNLGRAVFQAKKRVLEPLGLVEQAGETAPGKKRPLIESPQQPDSSTGIGKKGKQPAKKKLVFEDETGAGDGPPEGSTSGAMSDDSEMRAAAGGAAVEGGQGADGVGNASGDWHCDSTWSEGHVTTTSTRTWVLPTYNNHLYKRLGESLQSNTYNGFSTPWGYFDFNRFHCHFSPRDWQRLINNNWGMRPKAMRVKIFNIQVKEVTTSNGETTVANNLTSTVQIFADSSYELPYVMDAGQEGSLPPFPNDVFMVPQYGYCGLVTGNTSQQQTDRNAFYCLEYFPSQMLRTGNNFEITYSFEKVPFHSMYAHSQSLDRLMNPLIDQYLWGLQSTTTGTTLNAGTATTNFTKLRPTNFSNFKKNWLPGPSIKQQGFSKTANQNYKIPATGSDSLIKYETHSTLDGRWSALTPGPPMATAGPADSKFSNSQLIFAGPKQNGNTATVPGTLIFTSEEELAATNATDTDMWGNLPVRDFSLSNLPTVDRTTKLGAVPGMVWQNRDIYYQGPIWAKIPHTDGHFHPSPLIGGFGLKHPPPQIFIKNTPVPANPATTFSSTPVNSFITQYSTGQVSVQIDWEIQKERSKRWNPEVQFTSNYGQQNSLLWAPDAAGKYTEPRAIGTRYLTHHL

SEQ ID NO: 1141 - protein, 735 aa, Artificial Sequence
  source: /note="Description of Artificial Sequence: Synthetic polypeptide"
MAADGYLPDWLEDNLSEGVREWWALQPGAPKPKANQQHQDNARGLVLPGYKYLGPGNGLDKGEPVNAADAAALEHDKAYDQQLKAGDNPYLKYNHADAEFQQRLQGDTSFGGNLGRAVFQAKKRVLEPLGLVEQAGETAPGKKRPLIESPQQPDSSTGIGKKGKQPAKKKLVFEDETGAGDGPPEGSTSGAMSDDSEMRAAAGGAAVEGGQGADGVGNASGDWHCDSTWSEGHVTTTSTRTWVLPTYNNHLYKRLGESLQSNTYNGFSTPWGYFDFNRFHCHFSPRDWQRLINNNWGMRPKAMRVKIFNIQVKEVTTSNGETTVANNLTSTVQIFADSSYELPYVMDAGQEGSLPPFPNDVFMVPQYGYCGLVTGNTSQQQTDRNAFYCLEYFPSQMLRTGNNFEITYSFEKVPFHSMYAHSQSLDRLMNPLIDQYLWGLQSTTTGTTLNAGTATTNFTKLRPTNFSNFKKNWLPGPSIKQQGFSKTANQNYFIPATGSDSLIQYETHSTLDGRWSALTPGPPMATAGPADSKFSNSQLIFAGPKQNGNTATVPGTLIFTSEEELAATNATDTDMWGNLPGGDQSNSNLPTVDRLTALGAVPGMVWQNRDIYYQGPIWAKIPHTDGHFHPSPLIGGFGLKHPPPQIFIKNTPVPANPATTFSSTPVNSFITQYSTGQVSVQIDWEIQKERSKRWNPEVQFTSNYGQQNSLLWAPDAAGKYTEPRAIGTRYLTHHL

SEQ ID NO: 1142 - protein, 735 aa, Artificial Sequence
  source: /note="Description of Artificial Sequence: Synthetic polypeptide"
MAADGYLPDWLEDNLSEGVREWWALQPGAPKPKANQQHQDNARGLVLPGYKYLGPGNGLDKGEPVNAADAAALEHDKAYDQQLKAGDNPYLKYNHADAEFQQRLQGDTSFGGNLGRAVFQAKKRVLEPLGLVEQAGETAPGKKRPLIESPQQPDSSTGIGKKGKQPAKKKLVFEDETGAGDGPPEGSTSGAMSDDSEMRAAAGGAAVEGGQGADGVGNASGDWHCDSTWSEGHVTTTSTRTWVLPTYNNHLYKRLGESLQSNTYNGFSTPWGYFDFNRFHCHFSPRDWQRLINNNWGMRPKAMRVKIFNIQVKEVTTSNGETTVANNLTSTVQIFADSSYELPYVMDAGQEGSLPPFPNDVFMVPQYGYCGLVTGNTSQQQTDRNAFYCLEYFPSQMLRTGNNFEITYSFEKVPFHSMYAHSQSLDRLMNPLIDQYLWGLQSTTTGTTLNAGTATTNFTKLRPTNFSNFKKNWLPGPSIKQQGFSKTANQNYEMPATGSDSLIIYETHSTLDGRWSALTPGPPFATAGPADSKFSNSQLIFAGPKQNGNTATVPGTLIFTSEEELAATNATDTDVWGNLPSGDHSQSNLPTVDRPTMLGAVPGMVWQNRDIYYQGPIWAKIPHTDGHFHPSPLIGGFGLKHPPPQIFIKNTPVPANPATTFISTPVNSFITQYSTGQVSVHIDWEIQKERSKRWNPEVQFTSDYGQHSSLLWAPDAAGKYTEPTAIGTRYLTHHL

SEQ ID NO: 1143 - protein, 734 aa, Artificial Sequence
  source: /note="Description of Artificial Sequence: Synthetic polypeptide"
MAADGYLPDWLEDNLSEGVREWWALQPGAPKPKANQQHQDNARGLVLPGYKYLGPGNGLDKGEPVNAADAAALEHDKAYDQQLKAGDNPYLKYNHADAEFQQRLQGDTSFGGNLGRAVFQAKKRVLEPLGLVEQAGETAPGKKRPLIESPQQPDSSTGIGKKGKQPAKKKLVFEDETGAGDGPPEGSTSGAMSDDSEMRAAAGGAAVEGGQGADGVGNASGDWHCDSTWSEGHVTTTSTRTWVLPTYNNHLYKRLGESLQSNTYNGFSTPWGYFDFNRFHCHFSPRDWQRLINNNWGMRPKAMRVKIFNIQVKEVTTSNGETTVANNLTSTVQIFADSSYELPYVMDAGQEGSLPPFPNDVFMVPQYGYCGLVTGNTSQQQTDRNAFYCLEYFPSQMLRTGNNFEITYSFEKVPFHSMYAHSQSLDRLMNPLIDQYLWGLQSTTTGTTLNAGTATTNFTKLRPTNFSNFKKNWLPGPSIKQQGFSKTANQNDIPATGSDSLIKYETHSTLDGRWSALTPGPPMATAGPADSKFSNSQLIFAGPKQNGNTATVPGTLIFTSEEELAATNATDTDMWGNLPGGDQSNSNLPTVDRLTALGAVPGMVWQNRDIYYQGPIWAKIPHTDGHFHPSPLIGGFGLKHPPPQIFIKNTPVPANPATTFSSTPVNSFITQYSTGQVSVQIDWEIQKERSKRWNPEVQFTSNYGQQNSLLWAPDAAGKYTEPRAIGTRYLTHHL

SEQ ID NO: 1144 - protein, 735 aa, Artificial Sequence
  source: /note="Description of Artificial Sequence: Synthetic polypeptide"
MAADGYLPDWLEDNLSEGVREWWALQPGAPKPKANQQHQDNARGLVLPGYKYLGPGNGLDKGEPVNAADAAALEHDKAYDQQLKAGDNPYLKYNHADAEFQQRLQGDTSFGGNLGRAVFQAKKRVLEPLGLVEQAGETAPGKKRPLIESPQQPDSSTGIGKKGKQPAKKKLVFEDETGAGDGPPEGSTSGAMSDDSEMRAAAGGAAVEGGQGADGVGNASGDWHCDSTWSEGHVTTTSTRTWVLPTYNNHLYKRLGESLQSNTYNGFSTPWGYFDFNRFHCHFSPRDWQRLINNNWGMRPKAMRVKIFNIQVKEVTTSNGETTVANNLTSTVQIFADSSYELPYVMDAGQEGSLPPFPNDVFMVPQYGYCGLVTGNTSQQQTDRNAFYCLEYFPSQMLRTGNNFEITYSFEKVPFHSMYAHSQSLDRLMNPLIDQYLWGLQSTTTGTTLNAGTATTNFTKLRPTNFSNFKKNWLPGPSIKQQGFSKTANQNYIIPATGSDSLITYETHSTLDGRWSALTPGPPVATAGPADSKFSNSQLIFAGPKQNGNTATVPGTLIFTSEEELAATNATDTDMWGNLPFNDDSSSNLPTVDRSTFLGAVPGMVWQNRDIYYQGPIWAKIPHTDGHFHPSPLIGGFGLKHPPPQIFIKNTPVPANPATTFSSTPVNSFITQYSTGQVSVQIDWEIQKERSKRWNPEVQFTSNYGQQNSLLWAPDAAGKYTEPRAIGTRYLTHHL

SEQ ID NO: 1145 - protein, 733 aa, Artificial Sequence
  source: /note="Description of Artificial Sequence: Synthetic polypeptide"
MAADGYLPDWLEDNLSEGIREWWDLKPGAPKPKANQQKQDDGRGLVLPGYKYLGPFNGLDKGEPVNAADAAALEHDKAYDQQLKAGDNPYLRYNHADAEFQERLQEDTSFGGNLGRAVFQAKKRVLEPLGLVEEGAKTAPGKKRPLESPQEPDSSSGIGKKGKQPARKRLNFEEDTGAGDGPPEGSDTSAMSSDIEMRAAPGGNAVDAGQGSDGVGNASGDWHCDSTWSEGKVTTTSTRTWVLPTYNNHLYLRLGTTSSSNTYNGFSTPWGYFDFNRFHCHFSPRDWQRLINNNWGLRPKAMRVKIFNIQVKEVTTSNGETTVANNLTSTVQIFADSSYELPYVMDAGQEGSLPPFPNDVFMVPQYGYCGIVTGENQNQTDRNAFYCLEYFPSQMLRTGNNFEMAYNFEKVPFHSMYAHSQSLDRLMNPLLDQYLWHLQSTTSGETLNQGNAATTFGKIRSGDFAFYRKNWLPGPCVKQQRFSKTASQNYKIPASGGNALLKYDTHYTLNNRWSNIAPGPPMATAGPSDGDFSNAQLIFPGPSVTGNTTTSANNLLFTSEEEIAATNPRDTDMFGQIADNNQNATTAPITGNVTAMGVLPGMVWQNRDIYYQGPIWAKIPHADGHFHPSPLIGGFGLKHPPPQIFIKNTPVPANPATTFTAARVDSFITQYSTGQVAVQIEWEIEKERSKRWNPEVQFTSNYGNQSSMLWAPDTTGKYTEPRVIGSRYLTNHL

SEQ ID NO: 1146 - protein, 742 aa, Artificial Sequence; identical to SEQ ID NO: 957
  source: /note="Description of Artificial Sequence: Synthetic polypeptide"

SEQ ID NO: 1147 - protein, 733 aa, Artificial Sequence; identical to SEQ ID NO: 430
  source: /note="Description of Artificial Sequence: Synthetic polypeptide"

SEQ ID NO: 1148 - protein, 733 aa, Artificial Sequence; identical to SEQ ID NO: 147
  source: /note="Description of Artificial Sequence: Synthetic polypeptide"

SEQ ID NO: 1149 - protein, 733 aa, Artificial Sequence; identical to SEQ ID NO: 434
  source: /note="Description of Artificial Sequence: Synthetic polypeptide"

SEQ ID NO: 1150 - protein, 735 aa, Artificial Sequence
  source: /note="Description of Artificial Sequence: Synthetic polypeptide"
MAADGYLPDWLEDNLSEGVREWWALQPGAPKPKANQQHQDNARGLVLPGYKYLGPGNGLDKGEPVNAADAAALEHDKAYDQQLKAGDNPYLKYNHADAEFQQRLQGDTSFGGNLGRAVFQAKKRVLEPLGLVEQAGETAPGKKRPLIESPQQPDSSTGIGKKGKQPAKKKLVFEDETGAGDGPPEGSTSGAMSDDSEMRAAAGGAAVEGGQGADGVGNASGDWHCDSTWSEGHVTTTSTRTWVLPTYNNHLYKRLGESLQSNTYNGFSTPWGYFDFNRFHCHFSPRDWQRLINNNWGMRPKAMRVKIFNIQVKEVTTSNGETTVANNLTSTVQIFADSSYELPYVMDAGQEGSLPPFPNDVFMVPQYGYCGLVTGNTSQQQTDRNAFYCLEYFPSQMLRTGNNFEITYSFEKVPFHSMYAHSQSLDRLMNPLIDQYLWGLQSTTTGTTLNAGTATTNFTKLRPTNFSNFKKNWLPGPSIKQQGFSKTANQNYEIPATGSDSLIEYETHSTLDGRWSALTPGPPMATAGPADSKFSNSQLIFAGPKQNGNTATVPGTLIFTSEEELAATNATDTDMWGNLPGGDQSSSNLPTVDRLTALGAVPGMVWQNRDIYYQGPIWAKIPHTDGHFHPSPLIGGFGLKHPPPQIFIKNTPVPANPATTFSSTPVNSFITQYSTGQVSVQIDWEIQKERSKRWNPEVQFTSNYGQQNSLLWAPDAAGKYTEPRAIGTRYLTHHL

SEQ ID NO: 1151 - protein, 735 aa, Artificial Sequence
  source: /note="Description of Artificial Sequence: Synthetic polypeptide"
MAADGYLPDWLEDNLSEGVREWWALQPGAPKPKANQQHQDNARGLVLPGYKYLGPGNGLDKGEPVNAADAAALEHDKAYDQQLKAGDNPYLKYNHADAEFQQRLQGDTSFGGNLGRAVFQAKKRVLEPLGLVEQAGETAPGKKRPLIESPQQPDSSTGIGKKGKQPAKKKLVFEDETGAGDGPPEGSTSGAMSDDSEMRAAAGGAAVEGGQGADGVGNASGDWHCDSTWSEGHVTTTSTRTWVLPTYNNHLYKRLGESLQSNTYNGFSTPWGYFDFNRFHCHFSPRDWQRLINNNWGMRPKAMRVKIFNIQVKEVTTSNGETTVANNLTSTVQIFADSSYELPYVMDAGQEGSLPPFPNDVFMVPQYGYCGLVTGNTSQQQTDRNAFYCLEYFPSQMLRTGNNFEITYSFEKVPFHSMYAHSQSLDRLMNPLIDQYLWGLQSTTTGTTLNAGTATTNFTKLRPTNFSNFKKNWLPGPSIKQQGFSKTANQNYEIPATGSDSLIEYETHSTLDGRWSALTPGPPMATAGPADSKFSNSQLIFAGPKQNGNTATVPGTLIFTSEEELAATNATDTDMWGNLPGGDQSSSNLPVVRGLRALGAVPGMVWQNRDIYYQGPIWAKIPHTDGHFHPSPLIGGFGLKHPPPQIFIKNTPVPANPATTFSSTPVNSFITQYSTGQVSVQIDWEIQKERSKRWNPEVQFTSNYGQQNSLLWAPDAAGKYTEPRAIGTRYLTHHL

SEQ ID NO: 1152 - protein, 735 aa, Artificial Sequence
  source: /note="Description of Artificial Sequence: Synthetic polypeptide"
MAADGYLPDWLEDNLSEGVREWWALQPGAPKPKANQQHQDNARGLVLPGYKYLGPGNGLDKGEPVNAADAAALEHDKAYDQQLKAGDNPYLKYNHADAEFQQRLQGDTSFGGNLGRAVFQAKKRVLEPLGLVEQAGETAPGKKRPLIESPQQPDSSTGIGKKGKQPAKKKLVFEDETGAGDGPPEGSTSGAMSDDSEMRAAAGGAAVEGGQGADGVGNASGDWHCDSTWSEGHVTTTSTRTWVLPTYNNHLYKRLGESLQSNTYNGFSTPWGYFDFNRFHCHFSPRDWQRLINNNWGMRPKAMRVKIFNIQVKEVTTSNGETTVANNLTSTVQIFADSSYELPYVMDAGQEGSLPPFPNDVFMVPQYGYCGLVTGNTSQQQTDRNAFYCLEYFPSQMLRTGNNFEITYSFEKVPFHSMYAHSQSLDRLMNPLIDQYLWGLQSTTTGTTLNAGTATTNFTKLRPTNFSNFKKNWLPGPSIKQQGFSKTANQNYEIPATGSDSLIEYETHSTLDGRWSALTPGPPMATAGPADSKFSNSQLIFAGPKQNGNTATVPGTLIFTSEEELAATNATDTDMWGNLPGGDQSSSNLPVVNRLSALGAVPGMVWQNRDIYYQGPIWAKIPHTDGHFHPSPLIGGFGLKHPPPQIFIKNTPVPANPATTFSSTPVNSFITQYSTGQVSVQIDWEIQKERSKRWNPEVQFTSNYGQQNSLLWAPDAAGKYTEPRAIGTRYLTHHL

SEQ ID NO: 1153 - protein, 735 aa, Artificial Sequence
  source: /note="Description of Artificial Sequence: Synthetic polypeptide"
MAADGYLPDWLEDNLSEGVREWWALQPGAPKPKANQQHQDNARGLVLPGYKYLGPGNGLDKGEPVNAADAAALEHDKAYDQQLKAGDNPYLKYNHADAEFQQRLQGDTSFGGNLGRAVFQAKKRVLEPLGLVEQAGETAPGKKRPLIESPQQPDSSTGIGKKGKQPAKKKLVFEDETGAGDGPPEGSTSGAMSDDSEMRAAAGGAAVEGGQGADGVGNASGDWHCDSTWSEGHVTTTSTRTWVLPTYNNHLYKRLGESLQSNTYNGFSTPWGYFDFNRFHCHFSPRDWQRLINNNWGMRPKAMRVKIFNIQVKEVTTSNGETTVANNLTSTVQIFADSSYELPYVMDAGQEGSLPPFPNDVFMVPQYGYCGLVTGNTSQQQTDRNAFYCLEYFPSQMLRTGNNFEITYSFEKVPFHSMYAHSQSLDRLMNPLIDQYLWGLQSTTTGTTLNAGTATTNFTKLRPTNFSNFKKNWLPGPSIKQQGFSKTANQNYEIPATGSDSLIEYETHSTLDGRWSALTPGPPMATAGPADSKFSNSQLIFAGPKQNGNTATVPGTLIFTSEEELAATNATDTDMWGNLPGGDQSSSNLPPVMGLGALGAVPGMVWQNRDIYYQGPIWAKIPHTDGHFHPSPLIGGFGLKHPPPQIFIKNTPVPANPATTFSSTPVNSFITQYSTGQVSVQIDWEIQKERSKRWNPEVQFTSNYGQQNSLLWAPDAAGKYTEPRAIGTRYLTHHL

SEQ ID NO: 1154 - protein, 736 aa, Artificial Sequence
  source: /note="Description of Artificial Sequence: Synthetic polypeptide"
MAADGYLPDWLEDNLSEGVREWWALQPGAPKPKANQQHQDNARGLVLPGYKYLGPGNGLDKGEPVNAADAAALEHDKAYDQQLKAGDNPYLKYNHADAEFQQRLQGDTSFGGNLGRAVFQAKKRVLEPLGLVEQAGETAPGKKRPLIESPQQPDSSTGIGKKGKQPAKKKLVFEDETGAGDGPPEGSTSGAMSDDSEMRAAAGGAAVEGGQGADGVGNASGDWHCDSTWSEGHVTTTSTRTWVLPTYNNHLYKRLGESLQSNTYNGFSTPWGYFDFNRFHCHFSPRDWQRLINNNWGMRPKAMRVKIFNIQVKEVTTSNGETTVANNLTSTVQIFADSSYELPYVMDAGQEGSLPPFPNDVFMVPQYGYCGLVTGNTSQQQTDRNAFYCLEYFPSQMLRTGNNFEITYSFEKVPFHSMYAHSQSLDRLMNPLIDQYLWGLQSTTTGTTLNAGTATTNFTKLRPTNFSNFKKNWLPGPSIKQQGFSKTANQNYEIPATGSDSLIEYETHSTLDGRWSALTPGPPMATAGPADSKFSNSQLIFAGPKQNGNTATVPGTLIFTSEEELAATNATDTDMWGNLPGGDQSRVDRLPTVDRLTALGAVPGMVWQNRDIYYQGPIWAKIPHTDGHFHPSPLIGGFGLKHPPPQIFIKNTPVPANPATTFSSTPVNSFITQYSTGQVSVQIDWEIQKERSKRWNPEVQFTSNYGQQNSLLWAPDAAGKYTEPRAIGTRYLTHHL

SEQ ID NO: 1155 - protein, 736 aa, Artificial Sequence
  source: /note="Description of Artificial Sequence: Synthetic polypeptide"
MAADGYLPDWLEDNLSEGVREWWALQPGAPKPKANQQHQDNARGLVLPGYKYLGPGNGLDKGEPVNAADAAALEHDKAYDQQLKAGDNPYLKYNHADAEFQQRLQGDTSFGGNLGRAVFQAKKRVLEPLGLVEQAGETAPGKKRPLIESPQQPDSSTGIGKKGKQPAKKKLVFEDETGAGDGPPEGSTSGAMSDDSEMRAAAGGAAVEGGQGADGVGNASGDWHCDSTWSEGHVTTTSTRTWVLPTYNNHLYKRLGESLQSNTYNGFSTPWGYFDFNRFHCHFSPRDWQRLINNNWGMRPKAMRVKIFNIQVKEVTTSNGETTVANNLTSTVQIFADSSYELPYVMDAGQEGSLPPFPNDVFMVPQYGYCGLVTGNTSQQQTDRNAFYCLEYFPSQMLRTGNNFEITYSFEKVPFHSMYAHSQSLDRLMNPLIDQYLWGLQSTTTGTTLNAGTATTNFTKLRPTNFSNFKKNWLPGPSIKQQGFSKTANQNYEIPATGSDSLIEYETHSTLDGRWSALTPGPPMATAGPADSKFSNSQLIFAGPKQNGNTATVPGTLIFTSEEELAATNATDTDMWGNLPGGDQSRALRLPTVDRLTALGAVPGMVWQNRDIYYQGPIWAKIPHTDGHFHPSPLIGGFGLKHPPPQIFIKNTPVPANPATTFSSTPVNSFITQYSTGQVSVQIDWEIQKERSKRWNPEVQFTSNYGQQNSLLWAPDAAGKYTEPRAIGTRYLTHHL

SEQ ID NO: 1156 - DNA, 1172 bp, Artificial Sequence
  source: /note="Description of Artificial Sequence: Synthetic polynucleotide"
cttaattaggctgcgcgctcgctcgctcactgaggccgcccgggcaaagcccgggcgtcgggcgacctttggtcgcccggcctcagtgagcgagcgagcgcgcagagagggagtggccaactccatcactaggggttccttgtagttaatgattaacccgccatgctacttatctaccagggtaatggggatcctctagaactatagctagtcgacattgattattgactagttattaatagtaatcaattacggggtcattagttcatagcccatatatggagttccgcgttacataacttacggtaaatggcccgcctggctgaccgcccaacgacccccgcccattgacgtcaataatgacgtatgttcccatagtaacgccaatagggactttccattgacgtcaatgggtggactatttacggtaaactgcccacttggcagtacatcaagtgtatcatatgccaagtacgccccctattgacgtcaatgacggtaaatggcccgcctggcattatgcccagtacatgaccttatgggactttcctacttggcagtacatctacgtattagtcatcgctattaccatgtcgaggccacgttctgcttcactctccccatctcccccccctccccacccccaattttgtatttatttattttttaattattttgtgcagcgatgggggcggggggggggggcgcgcgccaggcggggcggggcggggcgaggggcggggcggggcgaggcggagaggtgcggcggcagccaatcagagcggcgcgctccgaaagtttccttttatggcgaggcggcggcggcggcggccctataaaaagcgaagcgcgcggcgggcgggagcaagctttattgcggtagtttatcacagttaaattgctaacgcagtcagtgcttctgacacaacagtctcgaacttaagctgcagaagttggtcgtgaggcactgggcaggtaagtatcaaggttacaagacaggtttaaggagaccaatagaaactgggcttgtcgagacagagaagactcttgcgtttctgataggcacctattggtcttactgacatccactttgcctttctctccacaggtgtccactcccagttcaattacagctcttaaggctagagtacttaatacgactcsactatagg

SEQ ID NO: 1157 - DNA, 3231 bp, Artificial Sequence
  source: /note="Description of Artificial Sequence: Synthetic polynucleotide"
taagaattcacgcgtggtacctctagagtcgacccgggcggcctcgaggacggggtgaactacgcctgaggatccgatctttttccctctgccaaaaattatggggacatcatgaagccccttgagcatctgacttctggctaataaaggaaatttattttcattgcaatagtgtgttggaattttttgtgtctctcactcggaagcaattcgttgatctgaatttcgaccacccataatacccattaccctggtagataagtagcatggcgggttaatcattaactacaaggaacccctagtgatggagttggccactccctctctgcgcgctcgctcgctcactgaggccgggcgaccaaaggtcgcccgacgcccgggctttgcccgggcggcctcagtgagcgagcgagcgcgcagccttaattaacctaattcactggccgtcgttttacaacgtcgtgactgggaaaaccctggcgttacccaacttaatcgccttgcagcacatccccctttcgccagctggcgtaatagcgaagaggcccgcaccgatcgcccttcccaacagttgcgcagcctgaatggcgaatgggacgcgccctgtagcggcgcattaagcgcggcgggtgtggtggttacgcgcagcgtgaccgctacacttgccagcgccctagcgcccgctcctttcgctttcttcccttcctttctcgccacgttcgccggctttccccgtcaagctctaaatcgggggctccctttagggttccgatttagtgctttacggcacctcgaccccaaaaaacttgattagggtgatggttcacgtagtgggccatcgccctgatagacggtttttcgccctttgacgttggagtccacgttctttaatagtggactcttgttccaaactggaacaacactcaaccctatctcggtctattcttttgatttataagggattttgccgatttcggcctattggttaaaaaatgagctgatttaacaaaaatttaacgcgaattttaacaaaatattaacgcttacaatttaggtggcacttttcggggaaatgtgcgcggaacccctatttgtttatttttctaaatacattcaaatatgtatccgctcatgagacaataaccctgataaatgcttcaataatattgaaaaaggaagagtatgagtattcaacatttccgtgtcgcccttattcccttttttgcggcattttgccttcctgtttttgctcacccagaaacgctggtgaaagtaaaagatgctgaagatcagttgggtgcacgagtgggttacatcgaactggatctcaacagcggtaagatccttgagagttttcgccccgaagaacgttttccaatgatgagcacttttaaagttctgctatgtggcgcggtattatcccgtattgacgccgggcaagagcaactcggtcgccgcatacactattctcagaatgacttggttgagtactcaccagtcacagaaaagcatcttacggatggcatgacagtaagagaattatgcagtgctgccataaccatgagtgataacactgcggccaacttacttctgacaacgatcggaggaccgaaggagctaaccgcttttttgcacaacatgggggatcatgtaactcgccttgatcgttgggaaccggagctgaatgaagccataccaaacgacgagcgtgacaccacgatgcctgtagcaatggcaacaacgttgcgcaaactattaactggcgaactacttactctagcttcccggcaacaattaatagactggatggaggcggataaagttgcaggaccacttctgcgctcggcccttccggctggctggtttattgctgataaatctggagccggtgagcgtgggtctcgcggtatcattgcagcactggggccagatggtaagccctcccgtatcgtagttatctacacgacggggagtcaggcaactatggatgaacgaaatagacagatcgctgagataggtgcctcactgattaagcattggtaactgtcagaccaagtttactcatatatactttagattgatttaaaacttcatttttaatttaaaaggatctaggtgaagatcctttttgataatctcatgaccaaaatcccttaacgtgagttttcgttccactgagcgtcagaccccgtagaaaagatcaaaggatcttcttgagatcctttttttctgcgcgtaatctgctgcttgcaaacaaaaaaaccaccgctaccagcggtggtttgtttgccggatcaagagctaccaactctttttccgaaggtaactggcttcagcagagcgcagataccaaatactgttcttctagtgtagccgtagttaggccaccacttcaagaactctgtagcaccgcctacatacctcgctctgctaatcctgttaccagtggctgctgccagtggcgataagtcgtgtcttaccgggttggactcaagacgatagttaccggataaggcgcagcggtcgggctgaacggggggttcgtgcacacagcccagcttggagcgaacgacctacaccgaactgagatacctacagcgtgagctatgagaaagcgccacgcttcccgaagggagaaaggcggacaggtatccggtaagcggcagggtcggaacaggagagcgcacgagggagcttccagggggaaacgcctggtatctttatagtcctgtcgggtttcgccacctctgacttgagcgtcgatttttgtgatgctcgtcaggggggcggagcctatggaaaaacgccagcaacgcggcctttttacggttcctggccttttgctggccttttgctcacatgttctttcctgcgttatcccctgattctgtggataaccgtattaccgcctttgagtgagctgataccgctcgccgcagccgaacgaccgagcgcagcgagtcagtgagcgaggaagcggaagagcgcccaatacgcaaaccgcctctccccgcgcgttggccgattcattaatgcagctggcacgacaggtttcccgactggaaagcgggcagtgagcgcaacgcaattaatgtgagttagctcactcattaggcaccccaggctttacactttatgcttccggctcgtatgttgtgtggaattgtgagcggataacaatttcacacaggaaacagctatgaccatgattacgccagatttaattaaggc

SEQ ID NO: 1158 - protein, 737 aa, Artificial Sequence
  source: /note="Description of Artificial Sequence: Synthetic polypeptide"
  MOD_RES (264)..(264): Any amino acid
  MOD_RES (266)..(266): Any amino acid
  MOD_RES (268)..(268): Any amino acid
  MOD_RES (448)..(448): Any amino acid
  MOD_RES (459)..(460): Any amino acid
  MOD_RES (467)..(467): Any amino acid
  MOD_RES (470)..(471): Any amino acid
  MOD_RES (474)..(474): Any amino acid
  MOD_RES (495)..(495): Any amino acid
  MOD_RES (516)..(516): Any amino acid
  MOD_RES (533)..(533): Any amino acid
  MOD_RES (547)..(547): Any amino acid
  MOD_RES (551)..(551): Any amino acid
  MOD_RES (555)..(555): Any amino acid
  MOD_RES (557)..(557): Any amino acid
  MOD_RES (561)..(561): Any amino acid
  MOD_RES (563)..(563): Any amino acid
  MOD_RES (577)..(577): Any amino acid
  MOD_RES (583)..(583): Any amino acid
  MOD_RES (593)..(593): Any amino acid
  MOD_RES (596)..(596): Any amino acid
  MOD_RES (661)..(662): Any amino acid
  MOD_RES (664)..(665): Any amino acid
  MOD_RES (710)..(710): Any amino acid
  MOD_RES (717)..(719): Any amino acid
  MOD_RES (723)..(723): Any amino acid
MAADGYLPDWLEDNLSEGIREWWDLKPGAPKPKANQQKQDDGRGLVLPGYKYLGPFNGLDKGEPVNAADAAALEHDKAYDQQLKAGDNPYLRYNHADAEFQERLQEDTSFGGNLGRAVFQAKKRVLEPLGLVEEGAKTAPGKKRPVEPSPQRSPDSSTGIGKKGQQPAKKRLNFGQTGDSESVPDPQPLGEPPAGPSGLGSGTMAAGGGAPMADNNEGADGVGNASGNWHCDSTWLGDRVITTSTRTWALPTYNNHLYKQISSXSXGXTNDNHYFGYSTPWGYFDFNRFHCHFSPRDWQRLINNNWGFRPKRLNFKLFNIQVKEVTTNDGVTTIANNLTSTVQVFSDSEYQLPYVLGSAHQGCLPPFPADVFMIPQYGYLTLNNGSQAVGRSSFYCLEYFPSQMLRTGNNFTFSYTFEDVPFHSSYAHSQSLDRLMNPLIDQYLYYLXRTQSTGGTAGXXELLFSQXGPXXMSXQAKNWLPGPCYRQQRVSKTLXQNNNSNFAWTGATKYHLNGRXSLVNPGVAMATHKDDEXRFFPSSGVLIFGKXGAGXNNTXLXNVMXTXEEEIKTTNPVATEXYGVVAXNLQSSNTAPXTGXVNSQGALPGMVWQNRDVYLQGPIWAKIPHTDGNFHPSPLMGGFGLKHPPPQILIKNTPVPANPPXXFXXAKFASFITQYSTGQVSVEIEWELQKENSKRWNPEIQYTSNYAKSXNVDFAVXXXGVYXEPRPIGTRYLTRNL

SEQ ID NO: 1159 - protein, 737 aa, Artificial Sequence
  source: /note="Description of Artificial Sequence: Synthetic polypeptide"
MAADGYLPDWLEDNLSEGIREWWDLKPGAPKPKANQQKQDDGRGLVLPGYKYLGPFNGLDKGEPVNAADAAALEHDKAYDQQLKAGDNPYLRYNHADAEFQERLQEDTSFGGNLGRAVFQAKKRVLEPLGLVEEGAKTAPGKKRPVEPSPQRSPDSSTGIGKKGQQPAKKRLNFGQTGDSESVPDPQPLGEPPAGPSGLGSGTMAAGGGAPMADNNEGADGVGNASGNWHCDSTWLGDRVITTSTRTWALPTYNNHLYKQISSASSGSTNDNHYFGYSTPWGYFDFNRFHCHFSPRDWQRLINNNWGFRPKRLNFKLFNIQVKEVTTNDGVTTIANNLTSTVQVFSDSEYQLPYVLGSAHQGCLPPFPADVFMIPQYGYLTLNNGSQAVGRSSFYCLEYFPSQMLRTGNNFTFSYTFEDVPFHSSYAHSQSLDRLMNPLIDQYLYYLARTQSTGGTAGNRELLFSQGGPSNMSAQAKNWLPGPCYRQQRVSKTLAQNNNSNFAWTGATKYHLNGRDSLVNPGVAMATHKDDEDRFFPSSGVLIFGKEGAGANNTALENVMLTNEEEIKTTNPVATEQYGVVASNLQSSNTAPATGAVNSQGALPGMVWQNRDVYLQGPIWAKIPHTDGNFHPSPLMGGFGLKHPPPQILIKNTPVPANPPATFTPAKFASFITQYSTGQVSVEIEWELQKENSKRWNPEIQYTSNYAKSTNVDFAVNNEGVYSEPRPIGTRYLTRNL

SEQ ID NO: 1160 - protein, 737 aa, Artificial Sequence
  source: /note="Description of Artificial Sequence: Synthetic polypeptide"
MAADGYLPDWLEDNLSEGIREWWDLKPGAPKPKANQQKQDDGRGLVLPGYKYLGPFNGLDKGEPVNAADAAALEHDKAYDQQLKAGDNPYLRYNHADAEFQERLQEDTSFGGNLGRAVFQAKKRVLEPLGLVEEGAKTAPGKKRPVEPSPQRSPDSSTGIGKKGQQPAKKRLNFGQTGDSESVPDPQPLGEPPAGPSGLGSGTMAAGGGAPMADNNEGADGVGNASGNWHCDSTWLGDRVITTSTRTWALPTYNNHLYKQISSQSSGSTNDNHYFGYSTPWGYFDFNRFHCHFSPRDWQRLINNNWGFRPKRLNFKLFNIQVKEVTTNDGVTTIANNLTSTVQVFSDSEYQLPYVLGSAHQGCLPPFPADVFMIPQYGYLTLNNGSQAVGRSSFYCLEYFPSQMLRTGNNFTFSYTFEDVPFHSSYAHSQSLDRLMNPLIDQYLYYLSRTQSTGGTAGNRELLFSQGGPANMSAQAKNWLPGPCYRQQRVSKTLSQNNNSNFAWTGATKYHLNGRDSLVNPGVAMATHKDDEERFFPSSGVLIFGKQGAGANNTTLDNVMMTSEEEIKTTNPVATEQYGVVASNLQSSNTAPQTGTVNSQGALPGMVWQNRDVYLQGPIWAKIPHTDGNFHPSPLMGGFGLKHPPPQILIKNTPVPANPPAVFSPAKFASFITQYSTGQVSVEIEWELQKENSKRWNPEIQYTSNYAKSTNVDFAVNSEGVYSEPRPIGTRYLTRNL

SEQ ID NO: 1161 - protein, 737 aa, Artificial Sequence
  source: /note="Description of Artificial Sequence: Synthetic polypeptide"
MAADGYLPDWLEDNLSEGIREWWDLKPGAPKPKANQQKQDDGRGLVLPGYKYLGPFNGLDKGEPVNAADAAALEHDKAYDQQLKAGDNPYLRYNHADAEFQERLQEDTSFGGNLGRAVFQAKKRVLEPLGLVEEGAKTAPGKKRPVEPSPQRSPDSSTGIGKKGQQPAKKRLNFGQTGDSESVPDPQPLGEPPAGPSGLGSGTMAAGGGAPMADNNEGADGVGNASGNWHCDSTWLGDRVITTSTRTWALPTYNNHLYKQISSASSGSTNDNHYFGYSTPWGYFDFNRFHCHFSPRDWQRLINNNWGFRPKRLNFKLFNIQVKEVTTNDGVTTIANNLTSTVQVFSDSEYQLPYVLGSAHQGCLPPFPADVFMIPQYGYLTLNNGSQAVGRSSFYCLEYFPSQMLRTGNNFTFSYTFEDVPFHSSYAHSQSLDRLMNPLIDQYLYYLARTQSTGGTAGTRELLFSQGGPSNMSAQAKNWLPGPCYRQQRVSKTLTQNNNSNFAWTGATKYHLNGRDSLVNPGVAMATHKDDEDRFFPSSGVLIFGKQGAGANNTALDNVMITNEEEIKTTNPVATEQYGVVASNLQSSNTAPATGTVNSQGALPGMVWQNRDVYLQGPIWAKIPHTDGNFHPSPLMGGFGLKHPPPQILIKNTPVPANPPTVFSPAKFASFITQYSTGQVSVEIEWELQKENSKRWNPEIQYTSNYAKSTNVDFAVNSEGVYTEPRPIGTRYLTRNL

SEQ ID NO: 1162 - protein, 737 aa, Artificial Sequence
  source: /note="Description of Artificial Sequence: Synthetic polypeptide"
  MOD_RES (264)..(264): Any amino acid
  MOD_RES (448)..(448): Any amino acid
  MOD_RES (459)..(459): Any amino acid
  MOD_RES (470)..(470): Any amino acid
  MOD_RES (495)..(495): Any amino acid
  MOD_RES (533)..(533): Any amino acid
  MOD_RES (547)..(547): Any amino acid
  MOD_RES (555)..(555): Any amino acid
  MOD_RES (557)..(557): Any amino acid
  MOD_RES (561)..(561): Any amino acid
  MOD_RES (563)..(563): Any amino acid
  MOD_RES (593)..(593): Any amino acid
  MOD_RES (596)..(596): Any amino acid
  MOD_RES (661)..(662): Any amino acid
  MOD_RES (664)..(664): Any amino acid
  MOD_RES (718)..(718): Any amino acid
  MOD_RES (723)..(723): Any amino acid
MAADGYLPDWLEDNLSEGIREWWDLKPGAPKPKANQQKQDDGRGLVLPGYKYLGPFNGLDKGEPVNAADAAALEHDKAYDQQLKAGDNPYLRYNHADAEFQERLQEDTSFGGNLGRAVFQAKKRVLEPLGLVEEGAKTAPGKKRPVEPSPQRSPDSSTGIGKKGQQPAKKRLNFGQTGDSESVPDPQPLGEPPAGPSGLGSGTMAAGGGAPMADNNEGADGVGNASGNWHCDSTWLGDRVITTSTRTWALPTYNNHLYKQISSXSSGSTNDNHYFGYSTPWGYFDFNRFHCHFSPRDWQRLINNNWGFRPKRLNFKLFNIQVKEVTTNDGVTTIANNLTSTVQVFSDSEYQLPYVLGSAHQGCLPPFPADVFMIPQYGYLTLNNGSQAVGRSSFYCLEYFPSQMLRTGNNFTFSYTFEDVPFHSSYAHSQSLDRLMNPLIDQYLYYLXRTQSTGGTAGXRELLFSQGGPXNMSAQAKNWLPGPCYRQQRVSKTLXQNNNSNFAWTGATKYHLNGRDSLVNPGVAMATHKDDEXRFFPSSGVLIFGKXGAGANNTXLXNVMXTXEEEIKTTNPVATEQYGVVASNLQSSNTAPXTGXVNSQGALPGMVWQNRDVYLQGPIWAKIPHTDGNFHPSPLMGGFGLKHPPPQILIKNTPVPANPPXXFXPAKFASFITQYSTGQVSVEIEWELQKENSKRWNPEIQYTSNYAKSTNVDFAVNXEGVYXEPRPIGTRYLTRNL

SEQ ID NO: 1163 - protein, 737 aa, Artificial Sequence
  source: /note="Description of Artificial Sequence: Synthetic polypeptide"
  MOD_RES (264)..(264): Any amino acid
  MOD_RES (448)..(448): Any amino acid
  MOD_RES (470)..(470): Any amino acid
  MOD_RES (533)..(533): Any amino acid
  MOD_RES (547)..(547): Any amino acid
  MOD_RES (555)..(555): Any amino acid
  MOD_RES (557)..(557): Any amino acid
  MOD_RES (561)..(561): Any amino acid
  MOD_RES (563)..(563): Any amino acid
  MOD_RES (593)..(593): Any amino acid
  MOD_RES (596)..(596): Any amino acid
  MOD_RES (662)..(662): Any amino acid
  MOD_RES (664)..(664): Any amino acid
  MOD_RES (718)..(718): Any amino acid
MAADGYLPDWLEDNLSEGIREWWDLKPGAPKPKANQQKQDDGRGLVLPGYKYLGPFNGLDKGEPVNAADAAALEHDKAYDQQLKAGDNPYLRYNHADAEFQERLQEDTSFGGNLGRAVFQAKKRVLEPLGLVEEGAKTAPGKKRPVEPSPQRSPDSSTGIGKKGQQPAKKRLNFGQTGDSESVPDPQPLGEPPAGPSGLGSGTMAAGGGAPMADNNEGADGVGNASGNWHCDSTWLGDRVITTSTRTWALPTYNNHLYKQISSXSSGSTNDNHYFGYSTPWGYFDFNRFHCHFSPRDWQRLINNNWGFRPKRLNFKLFNIQVKEVTTNDGVTTIANNLTSTVQVFSDSEYQLPYVLGSAHQGCLPPFPADVFMIPQYGYLTLNNGSQAVGRSSFYCLEYFPSQMLRTGNNFTFSYTFEDVPFHSSYAHSQSLDRLMNPLIDQYLYYLXRTQSTGGTAGNRELLFSQGGPXNMSAQAKNWLPGPCYRQQRVSKTLSQNNNSNFAWTGATKYHLNGRDSLVNPGVAMATHKDDEXRFFPSSGVLIFGKXGAGANNTXLXNVMXTXEEEIKTTNPVATEQYGVVASNLQSSNTAPXTGXVNSQGALPGMVWQNRDVYLQGPIWAKIPHTDGNFHPSPLMGGFGLKHPPPQILIKNTPVPANPPAXFXPAKFASFITQYSTGQVSVEIEWELQKENSKRWNPEIQYTSNYAKSTNVDFAVNXEGVYSEPRPIGTRYLTRNL

SEQ ID NO: 1164 - DNA, 2217 bp, Artificial Sequence
  source: /note="Description of Artificial Sequence: Synthetic polynucleotide"
atggctgccgatggttatcttccagattggctcgaggacactctctctgaaggaataagacagtggtggaagctcaaacctggcccaccaccaccaaagcccgcagagcggcataaggacgacagcaggggtcttgtgcttcctgggtacaagtacctcggacccttcaacggactcgacaagggagagccggtcaacgaggcagacgccgcggccctcgagcacgacaaagcctacgaccggcagctcgacagcggagacaacccgtacctcaagtacaaccacgccgacgcggagtttcaggagcgccttaaagaagatacgtcttttgggggcaacctcggacgagcagtcttccaggcgaaaaagagggttcttgaacctctgggcctggttgaggaacctgttaagacggctccgggaaagaagagaccggtagagccatcaccccagcgttctccagactcctctacgggcatcggcaagaaaggccaacagcccgccagaaaaagactcaattttggtcagactggcgactcagagtcagttccagaccctcaacctctcggagaacctccagcagcgccctctggtgtgggacctaatacaatggctgcaggcggtggcgcaccaatggcagacaataacgaaggcgccgacggagtgggtagttcctcgggaaattggcattgcgattccacatggctgggcgacagagtcatcaccaccagcacccgaacctgggccctgcccacctacaacaaccacctctacaagcaaatctccaacgggacatcgggaggagccaccaacgacaacacctacttcggctacagcaccccctgggggtattttgactttaacagattccactgccacttttcaccacgtgactggcagcgactcatcaacaacaactggggattccggcccaagagactcagcttcaagctcttcaacatccaggtcaaggaggtcacgcagaatgaaggcaccaagaccatcgccaataacctcaccagcaccatccaggtgtttacggactcggagtaccagctgccgtacgttctcggctctgcccaccagggctgcctgcctccgttcccggcggacgtgttcatgattccccagtacggctacctaacactcaacaacggtagtcaggccgtgggacgctcctccttctactgcctggaatactttccttcgcagatgctgagaaccggcaacaacttccagtttacttacaccttcgaggacgtgcctttccacagcagctacgcccacagccagagcttggaccggctgatgaatcctctgattgaccagtacctgtactacttgtctcggactcaaacaacaggaggcacggcaaatacgcagactctgggcttcagccaaggtgggcctaatacaatggccaatcaggcaaagaactggctgccaggaccctgttaccgccaacaacgcgtctcaacgacaaccgggcaaaacaacaatagcaactttgcctggactgctgggaccaaataccatctgaatggaagaaattcattggctaatcctggcatcgctatggcaacacacaaagacgacgaggagcgtttttttcccagtaacgggatcctgatttttggcaaacaaaatgctgccagagacaatgcggattacagcgatgtcatgctcaccagcgaggaagaaatcaaaaccactaaccctgtggctacagaggaatacggtatcgtggcagataacttgcagcagcaaaacacggctcctcaaattggaactgtcaacagccagggggccttacccggtatggtctggcagaaccgggacgtgtacctgcagggtcccatctgggccaagattcctcacacggacggcaacttccacccgtctccgctgatgggcggctttggcctgaaacatcctccgcctcagatcctgatcaagaacacgcctgtacctgcggatcctccgaccaccttcaaccagtcaaagctgaactctttcatcacgcaatacagcaccggacaggtcagcgtggaaattgaatgggagctgcagaaggaaaacagcaagcgctggaaccccgagatccagtacacctccaactactacaaatctacaagtgtggactttgctgttaatacagaaggcgtgtactctgaaccccgccccattggcacccgttacctcacccgtaatctgtaa

SEQ ID NO: 1165 - protein, 733 aa, Artificial Sequence; identical to SEQ ID NO: 950
  source: /note="Description of Artificial Sequence: Synthetic polypeptide"

SEQ ID NO: 1166 - DNA, 2203 bp, Artificial Sequence
  source: /note="Description of Artificial Sequence: Synthetic polynucleotide"
atgtcttttgttgatcaccctccagattggttggaagaagttggtgaaggtcttcgcgagtttttgggccttgaagcgggcccaccgaaaccaaaacccaatcagcagcatcaagatcaagcccgtggtcttgtgctgcctggttataactatctcggacccggaaacggtctcgatcgaggagagcctgtcaacagggcagacgaggtcgcgcgagagcacgacatctcgtacaacgagcagcttgaggcgggagacaacccctacctcaagtacaaccacgcggacgccgagtttcaggagaagctcgccgacgacacatccttcgggggaaacctcggaaaggcagtctttcaggccaagaaaagggttctcgaaccttttggcctggttgaagagggtgctaagacggcccctaccggaaagcggatagacgaccactttccaaaaagaaagaaggctcggaccgaagaggactccaagccttccacctcgtcagacgccgaagctggacccagcggatcccagcagctgcaaatcccagcccaaccagcctcaagtttgggagctgatacaatgtctgcgggaggtggcggcccattgggcgacaataaccaaggtgccgatggagtgggcaatgcctcgggagattggcattgcgattccacgtggatgggggacagagtcgtcaccaagtccacccgaacctgggtgctgcccagctacaacaaccaccagtaccgagagatcaaaagcggctccgtcgacggaagcaacgccaacgcctactttggatacagcaccccctgggggtactttgactttaaccgcttccacagccactggagcccccgagactggcaaagactcatcaacaactactggggcttcagaccccggtccctcagagtcaaaatcttcaacattcaagtcaaagaggtcacggtgcaggactccaccaccaccatcgccaacaacctcacctccaccgtccaagtgtttacggacgacgactaccagctgccctacgtcgtcggcaacgggaccgagggatgcctgccggccttccctccgcaggtctttacgctgccgcagtacggttacgcgacgctgaaccgcgacaacacagaaaatcccaccgagaggagcagcttcttctgcctagagtactttcccagcaagatgctgagaacgggcaacaactttgagtttacctacaactttgaggaggtgcccttccactccagcttcgctcccagtcagaacctgttcaagctggccaacccgctggtggaccagtacttgtaccgcttcgtgagcacaaataacactggcggagtccagttcaacaagaacctggccgggagatacgccaacacctacaaaaactggttcccggggcccatgggccgaacccagggctggaacctgggctccggggtcaaccgcgccagtgtcagcgccttcgccacgaccaataggatggagctcgagggcgcgagttaccaggtgcccccgcagccgaacggcatgaccaacaacctccagggcagcaacacctatgccctggagaacactatgatcttcaacagccagccggcgaacccgggcaccaccgccacgtacctcgagggcaacatgctcatcaccagcgagagcgagacgcagccggtgaaccgcgtggcgtacaacgtcggcgggcaggtggccaccaacaaccagagctccaccactgcccccgcgaccggcacgtacaacctccaggaaatcgtgcccggcagcgtgtggatggagagggacgtgtacctccaaggacccatctgggccaagatcccagagacgggggcgcactttcacccctctccggccatgggcggattcggactcaaacacccaccgcccatgatgctcatcaagaacacgcctgtgcccggaaatatcaccagcttctcggacgtgcccgtcagcagcttcatcacccagtacagcaccgggcaggtcaccgtggagatggagtgggagctcaagaaggaaaactccaagaggtggaacccagagatccagtacacaaacaactacaacgacccccagtttgtggactttgccccggacagcaccggggaatacagaaccaccagacctatcggaacccgataccttacccgacccctttaacccattcatgtcgcataccctcaataaa

SEQ ID NO: 1167 - protein, 724 aa, Artificial Sequence
  source: /note="Description of Artificial Sequence: Synthetic polypeptide"
MSFVDHPPDWLEEVGEGLREFLGLEAGPPKPKPNQQHQDQARGLVLPGYNYLGPGNGLDRGEPVNRADEVAREHDISYNEQLEAGDNPYLKYNHADAEFQEKLADDTSFGGNLGKAVFQAKKRVLEPFGLVEEGAKTAPTGKRIDDHFPKRKKARTEEDSKPSTSSDAEAGPSGSQQLQIPAQPASSLGADTMSAGGGGPLGDNNQGADGVGNASGDWHCDSTWMGDRVVTKSTRTWVLPSYNNHQYREIKSGSVDGSNANAYFGYSTPWGYFDFNRFHSHWSPRDWQRLINNYWGFRPRSLRVKIFNIQVKEVTVQDSTTTIANNLTSTVQVFTDDDYQLPYVVGNGTEGCLPAFPPQVFTLPQYGYATLNRDNTENPTERSSFFCLEYFPSKMLRTGNNFEFTYNFEEVPFHSSFAPSQNLFKLANPLVDQYLYRFVSTNNTGGVQFNKNLAGRYANTYKNWFPGPMGRTQGWNLGSGVNRASVSAFATTNRMELEGASYQVPPQPNGMTNNLQGSNTYALENTMIFNSQPANPGTTATYLEGNMLITSESETQPVNRVAYNVGGQVATNNQSSTTAPATGTYNLQEIVPGSVWMERDVYLQGPIWAKIPETGAHFHPSPAMGGFGLKHPPPMMLIKNTPVPGNITSFSDVPVSSFITQYSTGQVTVEMEWELKKENSKRWNPEIQYTNNYNDPQFVDFAPDSTGEYRTTRPIGTRYLTRPL

SEQ ID NO: 1168 - DNA, 2203 bp, Artificial Sequence
  source: /note="Description of Artificial Sequence: Synthetic polynucleotide"
atgtcttttgttgatcaccctccagattggttggaagaagttggtgaaggtcttcgcgagtttttgggccttgaagcgggcccaccgaaaccaaaacccaatcagcagcatcaagatcaagcccgtggtcttgtgctgcctggttataactatctcggacccggaaacggtctcgatcgaggagagcctgtcaacagggcagacgaggtcgcgcgagagcacgacatctcgtacaacgagcagcttgaggcgggagacaacccctacctcaagtacaaccacgcggacgccgagtttcaggagaagctcgccgacgacacatccttcgggggaaacctcggaaaggcagtctttcaggccaagaaaagggttctcgaaccttttggcctggttgaagagggtgctaagacggcccctaccggaaagcggatagacgaccactttccaaaaagaaagaaggctcggaccgaagaggactccaagccttccacctcgtcagacgccgaagctggacccagcggatcccagcagctgcaaatcccagcccaaccagcctcaagtttgggagctgatacaatgtctgcgggaggtggcggcccattgggcgacaataaccaaggtgccgatggagtgggcaatgcctcgggagattggcattgcgattccacgtggatgggggacagagtcgtcaccaagtccacccgaacctgggtgctgcccagctacaacaaccaccagtaccgagagatcaaaagcggctccgtcgacggaagcaacgccaacgcctactttggatacagcaccccctgggggtactttgactttaaccgcttccacagccactggagcccccgagactggcaaagactcatcaacaactactggggcttcagaccccggtccctcagagtcaaaatcttcaacattcaagtcaaagaggtcacggtgcaggactccaccaccaccatcgccaacaacctcacctccaccgtccaagtgtttacggacgacgactaccagctgccctacgtcgtcggcaacgggaccgagggatgcctgccggccttccctccgcaggtctttacgctgccgcagtacggttacgcgacgctgaaccgcgacaacacagaaaatcccaccgagaggagcagcttcttctgcctagagtactttcccagcaagatgctgagaacgggcaacaactttgagtttacctacaactttgaggaggtgcccttccactccagcttcgctcccagtcagaacctgttcaagctggccaacccgctggtggaccagtacttgtaccgcttcgtgagcacaaataacactggcggagtccagttcaacaagaacctggccgggagatacgccaacacctacaaaaactggttcccggggcccatgggccgaacccagggctggaacctgggctccggggtcaaccgcgccagtgtcagcgccttcgccacgaccaataggatggagctcgagggcgcgagttaccaggtgcccccgcagccgaacggcatgaccaacaacctccagggcagcaacacctatgccctggagaacactatgatcttcaacagccagccggcgaacccgggcaccaccgccacgtacctcgagggcaacatgctcatcaccagcgagagcgagacgcagccggtgaaccgcgtggcgtacaacgtcggcgggcagatggccaccaacaaccagagctccaccactgcccccgcgaccggcacggtcaacctccaggaaatcgtgcccggcagcgtgtggatggagagggacgtgtacctccaaggacccatctgggccaagatcccagagacgggggcgcactttcacccctctccggccatgggcggattcggactcaaacacccaccgcccatgatgctcatcaagaacacgcctgtgcccggaaatatcaccagcttctcggacgtgcccgtcagcagcttcatcacccagtacagcaccgggcaggtcaccgtggagatggagtgggagctcaagaaggaaaactccaagaggtggaacccagagatccagtacacaaacaactacaacgacccccagtttgtggactttgccccggacagcaccggggaatacagaaccaccagacctatcggaacccgataccttacccgacccctttaacccattcatgtcgcataccctcaataaa

SEQ ID NO: 1169 - protein, 724 aa, Artificial Sequence
  source: /note="Description of Artificial Sequence: Synthetic polypeptide"
MSFVDHPPDWLEEVGEGLREFLGLEAGPPKPKPNQQHQDQARGLVLPGYNYLGPGNGLDRGEPVNRADEVAREHDISYNEQLEAGDNPYLKYNHADAEFQEKLADDTSFGGNLGKAVFQAKKRVLEPFGLVEEGAKTAPTGKRIDDHFPKRKKARTEEDSKPSTSSDAEAGPSGSQQLQIPAQPASSLGADTMSAGGGGPLGDNNQGADGVGNASGDWHCDSTWMGDRVVTKSTRTWVLPSYNNHQYREIKSGSVDGSNANAYFGYSTPWGYFDFNRFHSHWSPRDWQRLINNYWGFRPRSLRVKIFNIQVKEVTVQDSTTTIANNLTSTVQVFTDDDYQLPYVVGNGTEGCLPAFPPQVFTLPQYGYATLNRDNTENPTERSSFFCLEYFPSKMLRTGNNFEFTYNFEEVPFHSSFAPSQNLFKLANPLVDQYLYRFVSTNNTGGVQFNKNLAGRYANTYKNWFPGPMGRTQGWNLGSGVNRASVSAFATTNRMELEGASYQVPPQPNGMTNNLQGSNTYALENTMIFNSQPANPGTTATYLEGNMLITSESETQPVNRVAYNVGGQMATNNQSSTTAPATGTVNLQEIVPGSVWMERDVYLQGPIWAKIPETGAHFHPSPAMGGFGLKHPPPMMLIKNTPVPGNITSFSDVPVSSFITQYSTGQVTVEMEWELKKENSKRWNPEIQYTNNYNDPQFVDFAPDSTGEYRTTRPIGTRYLTRPL

SEQ ID NO: 1170 - DNA, 2203 bp, Artificial Sequence
  source: /note="Description of Artificial Sequence: Synthetic polynucleotide"
atgtcttttgttgatcaccctccagattggttggaagaagttggtgaaggtcttcgcgagtttttgggccttgaagcgggcccaccgaaaccaaaacccaatcagcagcatcaagatcaagcccgtggtcttgtgctgcctggttataactatctcggacccggaaacggtctcgatcgaggagagcctgtcaacagggcagacgaggtcgcgcgagagcacgacatctcgtacaacgagcagcttgaggcgggagacaacccctacctcaagtacaaccacgcggacgccgagtttcaggagaagctcgccgacgacacatccttcgggggaaacctcggaaaggcagtctttcaggccaagaaaagggttctcgaaccttttggcctggttgaagagggtgctaagacggcccctaccggaaagcggatagacgaccactttccaaaaagaaagaaggctcggaccgaagaggactccaagccttccacctcgtcagacgccgaagctggacccagcggatcccagcagctgcaaatcccagcccaaccagcctcaagtttgggagctgatacaatgtctgcgggaggtggcggcccattgggcgacaataaccaaggtgccgatggagtgggcaatgcctcgggagattggcattgcgattccacgtggatgggggacagagtcgtcaccaagtccacccgaacctgggtgctgcccagctacaacaaccaccagtaccgagagatcaaaagcggctccgtcgacggaagcaacgccaacgcctactttggatacagcaccccctgggggtactttgactttaaccgcttccacagccactggagcccccgagactggcaaagactcatcaacaactactggggcttcagaccccggtccctcagagtcaaaatcttcaacattcaagtcaaagaggtcacggtgcaggactccaccaccaccatcgccaacaacctcacctccaccgtccaagtgtttacggacgacgactaccagctgccctacgtcgtcggcaacgggaccgagggatgcctgccggccttccctccgcaggtctttacgctgccgcagtacggttacgcgacgctgaaccgcgacaacacagaaaatcccaccgagaggagcagcttcttctgcctagagtactttcccagcaagatgctgagaacgggcaacaactttgagtttacctacaactttgaggaggtgcccttccactccagcttcgctcccagtcagaacctgttcaagctggccaacccgctggtggaccagtacttgtaccgcttcgtgagcacaaataacactggcggagtccagttcaacaagaacctggccgggagatacgccaacacctacaaaaactggttcccggggcccatgggccgaacccagggctggaacctgggctccggggtcaaccgcgccagtgtcagcgccttcgccacgaccaataggatggagctcgagggcgcgagttaccaggtgcccccgcagccgaacggcatgaccaacaacctccagggcagcaacacctatgccctggagaacactatgatcttcaacagccagccggcgaacccgggcaccaccgccacgtacctcgagggcaacatgctcatcaccagcgagagcgagacgcagccggtgaaccgcgtggcgtacaacgtcggcgggcagatggccaccaacaaccagagctccaccactgcccccgcgaccggcacgtacaacacccaggaaatcgtgcccggcagcgtgtggatggagagggacgtgtacctccaaggacccatctgggccaagatcccagagacgggggcgcactttcacccctctccggccatgggcggattcggactcaaacacccaccgcccatgatgctcatcaagaacacgcctgtgcccggaaatatcaccagcttctcggacgtgcccgtcagcagcttcatcacccagtacagcaccgggcaggtcaccgtggagatggagtgggagctcaagaaggaaaactccaagaggtggaacccagagatccagtacacaaacaactacaacgacccccagtttgtggactttgccccggacagcaccggggaatacagaaccaccagacctatcggaacccgataccttacccgacccctttaacccattcatgtcgcataccctcaataaa

SEQ ID NO: 1171 - protein, 724 aa, Artificial Sequence
  source: /note="Description of Artificial Sequence: Synthetic polypeptide"
MSFVDHPPDWLEEVGEGLREFLGLEAGPPKPKPNQQHQDQARGLVLPGYNYLGPGNGLDRGEPVNRADEVAREHDISYNEQLEAGDNPYLKYNHADAEFQEKLADDTSFGGNLGKAVFQAKKRVLEPFGLVEEGAKTAPTGKRIDDHFPKRKKARTEEDSKPSTSSDAEAGPSGSQQLQIPAQPASSLGADTMSAGGGGPLGDNNQGADGVGNASGDWHCDSTWMGDRVVTKSTRTWVLPSYNNHQYREIKSGSVDGSNANAYFGYSTPWGYFDFNRFHSHWSPRDWQRLINNYWGFRPRSLRVKIFNIQVKEVTVQDSTTTIANNLTSTVQVFTDDDYQLPYVVGNGTEGCLPAFPPQVFTLPQYGYATLNRDNTENPTERSSFFCLEYFPSKMLRTGNNFEFTYNFEEVPFHSSFAPSQNLFKLANPLVDQYLYRFVSTNNTGGVQFNKNLAGRYANTYKNWFPGPMGRTQGWNLGSGVNRASVSAFATTNRMELEGASYQVPPQPNGMTNNLQGSNTYALENTMIFNSQPANPGTTATYLEGNMLITSESETQPVNRVAYNVGGQMATNNQSSTTAPATGTYNTQEIVPGSVWMERDVYLQGPIWAKIPETGAHFHPSPAMGGFGLKHPPPMMLIKNTPVPGNITSFSDVPVSSFITQYSTGQVTVEMEWELKKENSKRWNPEIQYTNNYNDPQFVDFAPDSTGEYRTTRPIGTRYLTRPL

SEQ ID NO: 1172 - DNA, 2203 bp, Artificial Sequence
  source: /note="Description of Artificial Sequence: Synthetic polynucleotide"
atgtcttttgttgatcaccctccagattggttggaagaagttggtgaaggtcttcgcgagtttttgggccttgaagcgggcccaccgaaaccaaaacccaatcagcagcatcaagatcaagcccgtggtcttgtgctgcctggttataactatctcggacccggaaacggtctcgatcgaggagagcctgtcaacagggcagacgaggtcgcgcgagagcacgacatctcgtacaacgagcagcttgaggcgggagacaacccctacctcaagtacaaccacgcggacgccgagtttcaggagaagctcgccgacgacacatccttcgggggaaacctcggaaaggcagtctttcaggccaagaaaagggttctcgaaccttttggcctggttgaagagggtgctaagacggcccctaccggaaagcggatagacgaccactttccaaaaagaaagaaggctcggaccgaagaggactccaagccttccacctcgtcagacgccgaagctggacccagcggatcccagcagctgcaaatcccagcccaaccagcctcaagtttgggagctgatacaatgtctgcgggaggtggcggcccattgggcgacaataaccaaggtgccgatggagtgggcaatgcctcgggagattggcattgcgattccacgtggatgggggacagagtcgtcaccaagtccacccgaacctgggtgctgcccagctacaacaaccaccagtaccgagagatcaaaagcggctccgtcgacggaagcaacgccaacgcctactttggatacagcaccccctgggggtactttgactttaaccgcttccacagccactggagcccccgagactggcaaagactcatcaacaactactggggcttcagaccccggtccctcagagtcaaaatcttcaacattcaagtcaaagaggtcacggtgcaggactccaccaccaccatcgccaacaacctcacctccaccgtccaagtgtttacggacgacgactaccagctgccctacgtcgtcggcaacgggaccgagggatgcctgccggccttccctccgcaggtctttacgctgccgcagtacggttacgcgacgctgaaccgcgacaacacagaaaatcccaccgagaggagcagcttcttctgcctagagtactttcccagcaagatgctgagaacgggcaacaactttgagtttacctacaactttgaggaggtgcccttccactccagcttcgctcccagtcagaacctgttcaagctggccaacccgctggtggaccagtacttgtaccgcttcgtgagcacaaataacactggcggagtccagttcaacaagaacctggccgggagatacgccaacacctacaaaaactggttcccggggcccatgggccgaacccagggctggaacctgggctccggggtcaaccgcgccagtgtcagcgccttcgccacgaccaataggatggagctcgagggcgcgagttaccaggtgcccccgcagccgaacggcatgaccaacaacctccagggcagcaacacctatgccctggagaacactatgatcttcaacagccagccggcgaacccgggcaccaccgccacgtacctcgagggcaacatgctcatcaccagcgagagcgagacgcagccggtgaaccgcgtggcgtacaacgtcggcgggcagatggccaccaacaaccagagctccaccactgcccccgcgaccggcacggtcaacacccaggaaatcgtgcccggcagcgtgtggatggagagggacgtgtacctccaaggacccatctgggccaagatcccagagacgggggcgcactttcacccctctccggccatgggcggattcggactcaaacacccaccgcccatgatgctcatcaagaacacgcctgtgcccggaaatatcaccagcttctcggacgtgcccgtcagcagcttcatcacccagtacagcaccgggcaggtcaccgtggagatggagtgggagctcaagaaggaaaactccaagaggtggaacccagagatccagtacacaaacaactacaacgacccccagtttgtggactttgccccggacagcaccggggaatacagaaccaccagacctatcggaacccgataccttacccgacccctttaacccattcatgtcgcataccctcaataaa

SEQ ID NO: 1173 - protein, 724 aa, Artificial Sequence
  source: /note="Description of Artificial Sequence: Synthetic polypeptide"
MSFVDHPPDWLEEVGEGLREFLGLEAGPPKPKPNQQHQDQARGLVLPGYNYLGPGNGLDRGEPVNRADEVAREHDISYNEQLEAGDNPYLKYNHADAEFQEKLADDTSFGGNLGKAVFQAKKRVLEPFGLVEEGAKTAPTGKRIDDHFPKRKKARTEEDSKPSTSSDAEAGPSGSQQLQIPAQPASSLGADTMSAGGGGPLGDNNQGADGVGNASGDWHCDSTWMGDRVVTKSTRTWVLPSYNNHQYREIKSGSVDGSNANAYFGYSTPWGYFDFNRFHSHWSPRDWQRLINNYWGFRPRSLRVKIFNIQVKEVTVQDSTTTIANNLTSTVQVFTDDDYQLPYVVGNGTEGCLPAFPPQVFTLPQYGYATLNRDNTENPTERSSFFCLEYFPSKMLRTGNNFEFTYNFEEVPFHSSFAPSQNLFKLANPLVDQYLYRFVSTNNTGGVQFNKNLAGRYANTYKNWFPGPMGRTQGWNLGSGVNRASVSAFATTNRMELEGASYQVPPQPNGMTNNLQGSNTYALENTMIFNSQPANPGTTATYLEGNMLITSESETQPVNRVAYNVGGQMATNNQSSTTAPATGTVNTQEIVPGSVWMERDVYLQGPIWAKIPETGAHFHPSPAMGGFGLKHPPPMMLIKNTPVPGNITSFSDVPVSSFITQYSTGQVTVEMEWELKKENSKRWNPEIQYTNNYNDPQFVDFAPDSTGEYRTTRPIGTRYLTRPL

SEQ ID NO: 1174 - DNA, 2203 bp, Artificial Sequence
  source: /note="Description of Artificial Sequence: Synthetic polynucleotide"
atgtcttttgttgatcaccctccagattggttggaagaagttggtgaaggtcttcgcgagtttttgggccttgaagcgggcccaccgaaaccaaaacccaatcagcagcatcaagatcaagcccgtggtcttgtgctgcctggttataactatctcggacccggaaacggtctcgatcgaggagagcctgtcaacagggcagacgaggtcgcgcgagagcacgacatctcgtacaacgagcagcttgaggcgggagacaacccctacctcaagtacaaccacgcggacgccgagtttcaggagaagctcgccgacgacacatccttcgggggaaacctcggaaaggcagtctttcaggccaagaaaagggttctcgaaccttttggcctggttgaagagggtgctaagacggcccctaccggaaagcggatagacgaccactttccaaaaagaaagaaggctcggaccgaagaggactccaagccttccacctcgtcagacgccgaagctggacccagcggatcccagcagctgcaaatcccagcccaaccagcctcaagtttgggagctgatacaatgtctgcgggaggtggcggcccattgggcgacaataaccaaggtgccgatggagtgggcaatgcctcgggagattggcattgcgattccacgtggatgggggacagagtcgtcaccaagtccacccgaacctgggtgctgcccagctacaacaaccaccagtaccgagagatcaaaagcggctccgtcgacggaagcaacgccaacgcctactttggatacagcaccccctgggggtactttgactttaaccgcttccacagccactggagcccccgagactggcaaagactcatcaacaactactggggcttcagaccccggtccctcagagtcaaaatcttcaacattcaagtcaaagaggtcacggtgcaggactccaccaccaccatcgccaacaacctcacctccaccgtccaagtgtttacggacgacgactaccagctgccctacgtcgtcggcaacgggaccgagggatgcctgccggccttccctccgcaggtctttacgctgccgcagtacggttacgcgacgctgaaccgcgacaacacagaaaatcccaccgagaggagcagcttcttctgcctagagtactttcccagcaagatgctgagaacgggcaacaactttgagtttacctacaactttgaggaggtgcccttccactccagcttcgctcccagtcagaacctgttcaagctggccaacccgctggtggaccagtacttgtaccgcttcgtgagcacaaataacactggcggagtccagttcaacaagaacctggccgggagatacgccaacacctacaaaaactggttcccggggcccatgggccgaacccagggctggaacctgggctccggggtcaaccgcgccagtgtcagcgccttcgccacgaccaataggatggagctcgagggcgcgagttaccaggtgcccccgcagccgaacggcatgaccaacaacctccagggcagcaacacctatgccctggagaacactatgatcttcaacagccagccggcgaacccgggcaccaccgccacgtacctcgagggcaacatgctcatcaccagcgagagcgagacgcagccggtgaaccgcgtggcgtacaacgtcggcgggcagatggccaccaacaaccagagctccaccactgcccccgcgaccggcacgtacaacctccaggaaatcgtgcccggcagcgtgtggatggagagggacgtgtacctccaaggacccatctgggccaagatcccagagacgggggcgcactttcacccctctccggccatgggcggattcggactcaaacacccaccgcccatgatgctcatcaagaacacgcctgtgcccggaaatatcaccagcttctcggccgtgcccgtcagcagcttcatcacccagtacagcaccgggcaggtcaccgtggagatggagtgggagctcaagaaggaaaactccaagaggtggaacccagagatccagtacacaaacaactacaacgacccccagtttgtggactttgccccggacagcaccggggaatacagaaccaccagacctatcggaacccgataccttacccgacccctttaacccattcatgtcgcataccctcaataaa

SEQ ID NO: 1175 - protein, 724 aa, Artificial Sequence
  source: /note="Description of Artificial Sequence: Synthetic polypeptide"
MSFVDHPPDWLEEVGEGLREFLGLEAGPPKPKPNQQHQDQARGLVLPGYNYLGPGNGLDRGEPVNRADEVAREHDISYNEQLEAGDNPYLKYNHADAEFQEKLADDTSFGGNLGKAVFQAKKRVLEPFGLVEEGAKTAPTGKRIDDHFPKRKKARTEEDSKPSTSSDAEAGPSGSQQLQIPAQPASSLGADTMSAGGGGPLGDNNQGADGVGNASGDWHCDSTWMGDRVVTKSTRTWVLPSYNNHQYREIKSGSVDGSNANAYFGYSTPWGYFDFNRFHSHWSPRDWQRLINNYWGFRPRSLRVKIFNIQVKEVTVQDSTTTIANNLTSTVQVFTDDDYQLPYVVGNGTEGCLPAFPPQVFTLPQYGYATLNRDNTENPTERSSFFCLEYFPSKMLRTGNNFEFTYNFEEVPFHSSFAPSQNLFKLANPLVDQYLYRFVSTNNTGGVQFNKNLAGRYANTYKNWFPGPMGRTQGWNLGSGVNRASVSAFATTNRMELEGASYQVPPQPNGMTNNLQGSNTYALENTMIFNSQPANPGTTATYLEGNMLITSESETQPVNRVAYNVGGQMATNNQSSTTAPATGTYNLQEIVPGSVWMERDVYLQGPIWAKIPETGAHFHPSPAMGGFGLKHPPPMMLIKNTPVPGNITSFSAVPVSSFITQYSTGQVTVEMEWELKKENSKRWNPEIQYTNNYNDPQFVDFAPDSTGEYRTTRPIGTRYLTRPL

SEQ ID NO: 1176 - DNA, 2203 bp, Artificial Sequence
  source: /note="Description of Artificial Sequence: Synthetic polynucleotide"
atgtcttttgttgatcaccctccagattggttggaagaagttggtgaaggtcttcgcgagtttttgggccttgaagcgggcccaccgaaaccaaaacccaatcagcagcatcaagatcaagcccgtggtcttgtgctgcctggttataactatctcggacccggaaacggtctcgatcgaggagagcctgtcaacagggcagacgaggtcgcgcgagagcacgacatctcgtacaacgagcagcttgaggcgggagacaacccctacctcaagtacaaccacgcggacgccgagtttcaggagaagctcgccgacgacacatccttcgggggaaacctcggaaaggcagtctttcaggccaagaaaagggttctcgaaccttttggcctggttgaagagggtgctaagacggcccctaccggaaagcggatagacgaccactttccaaaaagaaagaaggctcggaccgaagaggactccaagccttccacctcgtcagacgccgaagctggacccagcggatcccagcagctgcaaatcccagcccaaccagcctcaagtttgggagctgatacaatgtctgcgggaggtggcggcccattgggcgacaataaccaaggtgccgatggagtgggcaatgcctcgggagattggcattgcgattccacgtggatgggggacagagtcgtcaccaagtccacccgaacctgggtgctgcccagctacaacaaccaccagtaccgagagatcaaaagcggctccgtcgacggaagcaacgccaacgcctactttggatacagcaccccctgggggtactttgactttaaccgcttccacagccactggagcccccgagactggcaaagactcatcaacaactactggggcttcagaccccggtccctcagagtcaaaatcttcaacattcaagtcaaagaggtcacggtgcaggactccaccaccaccatcgccaacaacctcacctccaccgtccaagtgtttatggacgacgactaccagctgccctacgtcgtcggcaacgggaccgagggatgcctgccggccttccctccgcaggtctttacgctgccgcagtacggttacgcgacgctgaaccgcgacaacacagaaaatcccaccgagaggagcagcttcttctgcctagagtactttcccagcaagatgctgagaacgggcaacaactttgagtttacctacaactttgaggaggtgcccttccactccagcttcgctcccagtcagaacctgttcaagctggccaacccgctggtggaccagtacttgtaccgcttcgtgagcacaaataacactggcggagtccagttcaacaagaacctggccgggagatacgccaacacctacaaaaactggttcccggggcccatgggccgaacccagggctggaacctgggctccggggtcaaccgcgccagtgtcagcgccttcgccacgaccaataggatggagctcgagggcgcgagttaccaggtgcccccgcagccgaacggcatgaccaacaacctccagggcagcaacacctatgccctggagaacactatgatcttcaacagccagccggcgaacccgggcaccaccgccacgtacctcgagggcaacatgctcatcaccagcgagagcgagacgcagccggtgaaccgcgtggcgtacaacgtcggcgggcagatggccaccaacaaccagagctccaccactgcccccgcgaccggcacgtacaacctccaggaaatcgtgcccggcagcgtgtggatggagagggacgtgtacctccaaggacccatctgggccaagatcccagagacgggggcgcactttcacccctctccggccatgggcggattcggactcaaacacccaccgcccatgatgctcatcaagaacacgcctgtgcccggaaatatcaccagcttctcggacgtgcccgtcagcagcttcatcacccagtacagcaccgggcaggtcaccgtggagatggagtgggagctcaagaaggaaaactccaagaggtggaacccagagatccagtacacaaacaactacaacgacccccagtttgtggactttgccccggacagcaccggggaatacagaaccaccagacctatcggaacccgataccttacccgacccctttaacccattcatgtcgcataccctcaataaa

SEQ ID NO: 1177 - protein, 724 aa, Artificial Sequence
  source: /note="Description of Artificial Sequence: Synthetic polypeptide"
MSFVDHPPDWLEEVGEGLREFLGLEAGPPKPKPNQQHQDQARGLVLPGYNYLGPGNGLDRGEPVNRADEVAREHDISYNEQLEAGDNPYLKYNHADAEFQEKLADDTSFGGNLGKAVFQAKKRVLEPFGLVEEGAKTAPTGKRIDDHFPKRKKARTEEDSKPSTSSDAEAGPSGSQQLQIPAQPASSLGADTMSAGGGGPLGDNNQGADGVGNASGDWHCDSTWMGDRVVTKSTRTWVLPSYNNHQYREIKSGSVDGSNANAYFGYSTPWGYFDFNRFHSHWSPRDWQRLINNYWGFRPRSLRVKIFNIQVKEVTVQDSTTTIANNLTSTVQVFMDDDYQLPYVVGNGTEGCLPAFPPQVFTLPQYGYATLNRDNTENPTERSSFFCLEYFPSKMLRTGNNFEFTYNFEEVPFHSSFAPSQNLFKLANPLVDQYLYRFVSTNNTGGVQFNKNLAGRYANTYKNWFPGPMGRTQGWNLGSGVNRASVSAFATTNRMELEGASYQVPPQPNGMTNNLQGSNTYALENTMIFNSQPANPGTTATYLEGNMLITSESETQPVNRVAYNVGGQMATNNQSSTTAPATGTYNLQEIVPGSVWMERDVYLQGPIWAKIPETGAHFHPSPAMGGFGLKHPPPMMLIKNTPVPGNITSFSDVPVSSFITQYSTGQVTVEMEWELKKENSKRWNPEIQYTNNYNDPQFVDFAPDSTGEYRTTRPIGTRYLTRPL

SEQ ID NO: 1178 - DNA, 2203 bp, Artificial Sequence
  source: /note="Description of Artificial Sequence: Synthetic polynucleotide"
atgtcttttgttgatcaccctccagattggttggaagaagttggtgaaggtcttcgcgagtttttgggccttgaagcgggcccaccgaaaccaaaacccaatcagcagcatcaagatcaagcccgtggtcttgtgctgcctggttataactatctcggacccggaaacggtctcgatcgaggagagcctgtcaacagggcagacgaggtcgcgcgagagcacgacatctcgtacaacgagcagcttgaggcgggagacaacccctacctcaagtacaaccacgcggacgccgagtttcaggagaagctcgccgacgacacatccttcgggggaaacctcggaaaggcagtctttcaggccaagaaaagggttctcgaaccttttggcctggttgaagagggtgctaagacggcccctaccggaaagcggatagacgaccactttccaaaaagaaagaaggctcggaccgaagaggactccaagccttccacctcgtcagacgccgaagctggacccagcggatcccagcagctgcaaatcccagcccaaccagcctcaagtttgggagctgatacaatgtctgcgggaggtggcggcccattgggcgacaataaccaaggtgccgatggagtgggcaatgcctcgggagattggcattgcgattccacgtggatgggggacagagtcgtcaccaagtccacccgaacctgggtgctgcccagctacaacaaccaccagtaccgagagatcaaaagcggctccgtcgacggaagcaacgccaacgcctactttggatacagcaccccctgggggtactttgactttaaccgcttccacagccactggagcccccgagactggcaaagactcatcaacaactactggggcttcagaccccggtccctcagagtcaaaatcttcaacattcaagtcaaagaggtcacggtgcaggactccaccaccaccatcgccaacaacctcacctccaccgtcgatgtgtttacggacgacgactaccagctgccctacgtcgtcggcaacgggaccgagggatgcctgccggccttccctccgcaggtctttacgctgccgcagtacggttacgcgacgctgaaccgcgacaacacagaaaatcccaccgagaggagcagcttcttctgcctagagtactttcccagcaagatgctgagaacgggcaacaactttgagtttacctacaactttgaggaggtgcccttccactccagcttcgctcccagtcagaacctgttcaagctggccaacccgctggtggaccagtacttgtaccgcttcgtgagcacaaataacactggcggagtccagttcaacaagaacctggccgggagatacgccaacacctacaaaaactggttcccggggcccatgggccgaacccagggctggaacctgggctccggggtcaaccgcgccagtgtcagcgccttcgccacgaccaataggatggagctcgagggcgcgagttaccaggtgcccccgcagccgaacggcatgaccaacaacctccagggcagcaacacctatgccctggagaacactatgatcttcaacagccagccggcgaacccgggcaccaccgccacgtacctcgagggcaacatgctcatcaccagcgagagcgagacgcagccggtgaaccgcgtggcgtacaacgtcggcgggcagatggccaccaacaaccagagctccaccactgcccccgcgaccggcacgtacaacctccaggaaatcgtgcccggcagcgtgtggatggagagggacgtgtacctccaaggacccatctgggccaagatcccagagacgggggcgcactttcacccctctccggccatgggcggattcggactcaaacacccaccgcccatgatgctcatcaagaacacgcctgtgcccggaaatatcaccagcttctcggacgtgcccgtcagcagcttcatcacccagtacagcaccgggcaggtcaccgtggagatggagtgggagctcaagaaggaaaactccaagaggtggaacccagagatccagtacacaaacaactacaacgacccccagtttgtggactttgccccggacagcaccggggaatacagaaccaccagacctatcggaacccgataccttacccgacccctttaacccattcatgtcgcataccctcaataaa

SEQ ID NO: 1179 - protein, 724 aa, Artificial Sequence
  source: /note="Description of Artificial Sequence: Synthetic polypeptide"
MSFVDHPPDWLEEVGEGLREFLGLEAGPPKPKPNQQHQDQARGLVLPGYNYLGPGNGLDRGEPVNRADEVAREHDISYNEQLEAGDNPYLKYNHADAEFQEKLADDTSFGGNLGKAVFQAKKRVLEPFGLVEEGAKTAPTGKRIDDHFPKRKKARTEEDSKPSTSSDAEAGPSGSQQLQIPAQPASSLGADTMSAGGGGPLGDNNQGADGVGNASGDWHCDSTWMGDRVVTKSTRTWVLPSYNNHQYREIKSGSVDGSNANAYFGYSTPWGYFDFNRFHSHWSPRDWQRLINNYWGFRPRSLRVKIFNIQVKEVTVQDSTTTIANNLTSTVDVFTDDDYQLPYVVGNGTEGCLPAFPPQVFTLPQYGYATLNRDNTENPTERSSFFCLEYFPSKMLRTGNNFEFTYNFEEVPFHSSFAPSQNLFKLANPLVDQYLYRFVSTNNTGGVQFNKNLAGRYANTYKNWFPGPMGRTQGWNLGSGVNRASVSAFATTNRMELEGASYQVPPQPNGMTNNLQGSNTYALENTMIFNSQPANPGTTATYLEGNMLITSESETQPVNRVAYNVGGQMATNNQSSTTAPATGTYNLQEIVPGSVWMERDVYLQGPIWAKIPETGAHFHPSPAMGGFGLKHPPPMMLIKNTPVPGNITSFSDVPVSSFITQYSTGQVTVEMEWELKKENSKRWNPEIQYTNNYNDPQFVDFAPDSTGEYRTTRPIGTRYLTRPL

SEQ ID NO: 1180 - DNA, 2203 bp, Artificial Sequence
  source: /note="Description of Artificial Sequence: Synthetic polynucleotide"
atgtcttttgttgatcaccctccagattggttggaagaagttggtgaaggtcttcgcgagtttttgggccttgaagcgggcccaccgaaaccaaaacccaatcagcagcatcaagatcaagcccgtggtcttgtgctgcctggttataactatctcggacccggaaacggtctcgatcgaggagagcctgtcaacagggcagacgaggtcgcgcgagagcacgacatctcgtacaacgagcagcttgaggcgggagacaacccctacctcaagtacaaccacgcggacgccgagtttcaggagaagctcgccgacgacacatccttcgggggaaacctcggaaaggcagtctttcaggccaagaaaagggttctcgaaccttttggcctggttgaagagggtgctaagacggcccctaccggaaagcggatagacgaccactttccaaaaagaaagaaggctcggaccgaagaggactccaagccttccacctcgtcagacgccgaagctggacccagcggatcccagcagctgcaaatcccagcccaaccagcctcaagtttgggagctgatacaatgtctgcgggaggtggcggcccattgggcgacaataaccaaggtgccgatggagtgggcaatgcctcgggagattggcattgcgattccacgtggatgggggacagagtcgtcaccaagtccacccgaacctgggtgctgcccagctacaacaaccaccagtaccgagagatcaaaagcggctccgtcgacggaagcaacgccaacgcctactttggatacagcaccccctgggggtactttgactttaaccgcttccacagccactggagcccccgagactggcaaagactcatcaacaactactggggcttcagaccccggtccctcagagtcaaaatcttcaacattcaagtcaaagaggtcacggtgcaggactccaccaccaccatcgccaacaacctcacctccaccgtccaagtgtttacggacgacgactaccagctgccctacgtcgtcggcaacgggacccagggatgcctgccggccttccctccgcaggtctttacgctgccgcagtacggttacgcgacgctgaaccgcgacaacacagaaaatcccaccgagaggagcagcttcttctgcctagagtactttcccagcaagatgctgagaacgggcaacaactttgagtttacctacaactttgaggaggtgcccttccactccagcttcgctcccagtcagaacctgttcaagctggccaacccgctggtggaccagtacttgtaccgcttcgtgagcacaaataacactggcggagtccagttcaacaagaacctggccgggagatacgccaacacctacaaaaactggttcccggggcccatgggccgaacccagggctggaacctgggctccggggtcaaccgcgccagtgtcagcgccttcgccacgaccaataggatggagctcgagggcgcgagttaccaggtgcccccgcagccgaacggcatgaccaacaacctccagggcagcaacacctatgccctggagaacactatgatcttcaacagccagccggcgaacccgggcaccaccgccacgtacctcgagggcaacatgctcatcaccagcgagagcgagacgcagccggtgaaccgcgtggcgtacaacgtcggcgggcagatggccaccaacaaccagagctccaccactgcccccgcgaccggcacgtacaacctccaggaaatcgtgcccggcagcgtgtggatggagagggacgtgtacctccaaggacccatctgggccaagatcccagagacgggggcgcactttcacccctctccggccatgggcggattcggactcaaacacccaccgcccatgatgctcatcaagaacacgcctgtgcccggaaatatcaccagcttctcggacgtgcccgtcagcagcttcatcacccagtacagcaccgggcaggtcaccgtggagatggagtgggagctcaagaaggaaaactccaagaggtggaacccagagatccagtacacaaacaactacaacgacccccagtttgtggactttgccccggacagcaccggggaatacagaaccaccagacctatcggaacccgataccttacccgacccctttaacccattcatgtcgcataccctcaataaa

SEQ ID NO: 1181 - protein, 724 aa, Artificial Sequence
  source: /note="Description of Artificial Sequence: Synthetic polypeptide"
MSFVDHPPDWLEEVGEGLREFLGLEAGPPKPKPNQQHQDQARGLVLPGYNYLGPGNGLDRGEPVNRADEVAREHDISYNEQLEAGDNPYLKYNHADAEFQEKLADDTSFGGNLGKAVFQAKKRVLEPFGLVEEGAKTAPTGKRIDDHFPKRKKARTEEDSKPSTSSDAEAGPSGSQQLQIPAQPASSLGADTMSAGGGGPLGDNNQGADGVGNASGDWHCDSTWMGDRVVTKSTRTWVLPSYNNHQYREIKSGSVDGSNANAYFGYSTPWGYFDFNRFHSHWSPRDWQRLINNYWGFRPRSLRVKIFNIQVKEVTVQDSTTTIANNLTSTVQVFTDDDYQLPYVVGNGTQGCLPAFPPQVFTLPQYGYATLNRDNTENPTERSSFFCLEYFPSKMLRTGNNFEFTYNFEEVPFHSSFAPSQNLFKLANPLVDQYLYRFVSTNNTGGVQFNKNLAGRYANTYKNWFPGPMGRTQGWNLGSGVNRASVSAFATTNRMELEGASYQVPPQPNGMTNNLQGSNTYALENTMIFNSQPANPGTTATYLEGNMLITSESETQPVNRVAYNVGGQMATNNQSSTTAPATGTYNLQEIVPGSVWMERDVYLQGPIWAKIPETGAHFHPSPAMGGFGLKHPPPMMLIKNTPVPGNITSFSDVPVSSFITQYSTGQVTVEMEWELKKENSKRWNPEIQYTNNYNDPQFVDFAPDSTGEYRTTRPIGTRYLTRPL

SEQ ID NO: 1182 - DNA, 2203 bp, Artificial Sequence
  source: /note="Description of Artificial Sequence: Synthetic polynucleotide"
atgtcttttgttgatcaccctccagattggttggaagaagttggtgaaggtcttcgcgagtttttgggccttgaagcgggcccaccgaaaccaaaacccaatcagcagcatcaagatcaagcccgtggtcttgtgctgcctggttataactatctcggacccggaaacggtctcgatcgaggagagcctgtcaacagggcagacgaggtcgcgcgagagcacgacatctcgtacaacgagcagcttgaggcgggagacaacccctacctcaagtacaaccacgcggacgccgagtttcaggagaagctcgccgacgacacatccttcgggggaaacctcggaaaggcagtctttcaggccaagaaaagggttctcgaaccttttggcctggttgaagagggtgctaagacggcccctaccggaaagcggatagacgaccactttccaaaaagaaagaaggctcggaccgaagaggactccaagccttccacctcgtcagacgccgaagctggacccagcggatcccagcagctgcaaatcccagcccaaccagcctcaagtttgggagctgatacaatgtctgcgggaggtggcggcccattgggcgacaataaccaaggtgccgatggagtgggcaatgcctcgggagattggcattgcgattccacgtggatgggggacagagtcgtcaccaagtccacccgaacctgggtgctgcccagctacaacaaccaccagtaccgagagatcaaaagcggctccgtcgacggaagcaacgccaacgcctactttggatacagcaccccctgggggtactttgactttaaccgcttccacagccactggagcccccgagactggcaaagactcatcaacaactactggggcttcagaccccggtccctcagagtcaaaatcttcaacattcaagtcaaagaggtcacggtgcaggactccaccaccaccatcgccaacaacctcacctccaccgtccaagtgtttacggacgacgactaccagctgccctacgtcgtcggcaacgggaccgagggatgcctgccggccttccctccgcaggtctttacgctgccgcagtacggttacgcgacgctgaaccgcgacaacacagaaaatcccaccgagaggagcagcttcttctgcctagagtactttcccagcaagatgctgagaacgggcaacaactttgagtttacctacaactttgaggaggtgcccttccactccagcttcgctcccagtcagaacctgttcaagctggccaacccgctggtggaccagtacttgtaccgcttcgtgagcacaaataacactggcggagtccagttcaacaagaacctggccgggagatacgccaacacctacaaaaactggttcccggggcccatgggccgaacccagggctggaacctgggctccggggtcaaccgcgccagtgtcagcgccttcgccacgaccaataggatggagctcgagggcgcgagttaccaggtgcccccgcagccgaacggcatgaccaacaacctccagggcagcaacacctatgccctggagaacactatgatcttcaacagccagtcggcgaacccgggcaccaccgccacgtacctcgagggcaacatgctcatcaccagcgagagcgagacgcagccggtgaaccgcgtggcgtacaacgtcggcgggcagatggccaccaacaaccagagctccaccactgcccccgcgaccggcacgtacaacctccaggaaatcgtgcccggcagcgtgtggatggagagggacgtgtacctccaaggacccatctgggccaagatcccagagacgggggcgcactttcacccctctccggccatgggcggattcggactcaaacacccaccgcccatgatgctcatcaagaacacgcctgtgcccggaaatatcaccagcttctcggacgtgcccgtcagcagcttcatcacccagtacagcaccgggcaggtcaccgtggagatggagtgggagctcaagaaggaaaactccaagaggtggaacccagagatccagtacacaaacaactacaacgacccccagtttgtggactttgccccggacagcaccggggaatacagaaccaccagacctatcggaacccgataccttacccgacccctttaacccattcatgtcgcataccctcaataaa

SEQ ID NO: 1183 - protein, 724 aa, Artificial Sequence
  source: /note="Description of Artificial Sequence: Synthetic polypeptide"
MSFVDHPPDWLEEVGEGLREFLGLEAGPPKPKPNQQHQDQARGLVLPGYNYLGPGNGLDRGEPVNRADEVAREHDISYNEQLEAGDNPYLKYNHADAEFQEKLADDTSFGGNLGKAVFQAKKRVLEPFGLVEEGAKTAPTGKRIDDHFPKRKKARTEEDSKPSTSSDAEAGPSGSQQLQIPAQPASSLGADTMSAGGGGPLGDNNQGADGVGNASGDWHCDSTWMGDRVVTKSTRTWVLPSYNNHQYREIKSGSVDGSNANAYFGYSTPWGYFDFNRFHSHWSPRDWQRLINNYWGFRPRSLRVKIFNIQVKEVTVQDSTTTIANNLTSTVQVFTDDDYQLPYVVGNGTEGCLPAFPPQVFTLPQYGYATLNRDNTENPTERSSFFCLEYFPSKMLRTGNNFEFTYNFEEVPFHSSFAPSQNLFKLANPLVDQYLYRFVSTNNTGGVQFNKNLAGRYANTYKNWFPGPMGRTQGWNLGSGVNRASVSAFATTNRMELEGASYQVPPQPNGMTNNLQGSNTYALENTMIFNSQSANPGTTATYLEGNMLITSESETQPVNRVAYNVGGQMATNNQSSTTAPATGTYNLQEIVPGSVWMERDVYLQGPIWAKIPETGAHFHPSPAMGGFGLKHPPPMMLIKNTPVPGNITSFSDVPVSSFITQYSTGQVTVEMEWELKKENSKRWNPEIQYTNNYNDPQFVDFAPDSTGEYRTTRPIGTRYLTRPL

SEQ ID NO: 1184 - DNA, 2203 bp, Artificial Sequence
  source: /note="Description of Artificial Sequence: Synthetic polynucleotide"
atgtcttttgttgatcaccctccagattggttggaagaagttggtgaaggtcttcgcgagtttttgggccttgaagcgggcccaccgaaaccaaaacccaatcagcagcatcaagatcaagcccgtggtcttgtgctgcctggttataactatctcggacccggaaacggtctcgatcgaggagagcctgtcaacagggcagacgaggtcgcgcgagagcacgacatctcgtacaacgagcagcttgaggcgggagacaacccctacctcaagtacaaccacgcggacgccgagtttcaggagaagctcgccgacgacacatccttcgggggaaacctcggaaaggcagtctttcaggccaagaaaagggttctcgaaccttttggcctggttgaagagggtgctaagacggcccctaccggaaagcggatagacgaccactttccaaaaagaaagaaggctcggaccgaagaggactccaagccttccacctcgtcagacgccgaagctggacccagcggatcccagcagctgcaaatcccagcccaaccagcctcaagtttgggagctgatacaatgtctgcgggaggtggcggcccattgggcgacaataaccaaggtgccgatggagtgggcaatgcctcgggagattggcattgcgattccacgtggatgggggacagagtcgtcaccaagtccacccgaacctgggtgctgcccagctacaacaaccaccagtaccgagagatcaaaagcggctccgtcgacggaagcaacgccaacgcctactttggatacagcaccccctgggggtactttgactttaaccgcttccacagccactggagcccccgagactggcaaagactcatcaacaactactggggcttcagaccccggtccctcagagtcaaaatcttcaacattcaagtcaaagaggtcacggtgcaggactccaccaccaccatcgccaacaacctcacctccaccgtccaagtgtttacggacgacgactaccagctgccctacgtcgtcggcaacgggaccgagggatgcctgccggccttccctccgcaggtctttacgctgccgcagtacggttacgcgacgctgaaccgcgacaacacagaaaatcccaccgagaggagcagcttcttctgcctagagtactttcccagcaagatgctgagaacgggcaacaactttgagtttacctacaactttgaggaggtgcccttccactccagcttcgctcccagtcagaacctgttcaagctggccaacccgctggtggaccagtacttgtaccgcttcgtgagcacaaataacactggcggagtccagttcaacaagaacctggccgggagatacgccaacacctacaaaaactggttcccggggcccatgggccgaacccagggctggaacctgggctccggggtcaaccgcgccagtgtcagcgccttcgccacgaccaataggatggagctcgagggcgcgagttaccaggtgcccccgcagccgaacggcatgaccaacaacctccagggcagcaacacctatgccctggagaacactatgatcttcaacagccagggggcgaacccgggcaccaccgccacgtacctcgagggcaacatgctcatcaccagcgagagcgagacgcagccggtgaaccgcgtggcgtacaacgtcggcgggcagatggccaccaacaaccagagctccaccactgcccccgcgaccggcacgtacaacctccaggaaatcgtgcccggcagcgtgtggatggagagggacgtgtacctccaaggacccatctgggccaagatcccagagacgggggcgcactttcacccctctccggccatgggcggattcggactcaaacacccaccgcccatgatgctcatcaagaacacgcctgtgcccggaaatatcaccagcttctcggacgtgcccgtcagcagcttcatcacccagtacagcaccgggcaggtcaccgtggagatggagtgggagctcaagaaggaaaactccaagaggtggaacccagagatccagtacacaaacaactacaacgacccccagtttgtggactttgccccggacagcaccggggaatacagaaccaccagacctatcggaacccgataccttacccgacccctttaacccattcatgtcgcataccctcaataaa

SEQ ID NO: 1185 - protein, 724 aa, Artificial Sequence
  source: /note="Description of Artificial Sequence: Synthetic polypeptide"
MSFVDHPPDWLEEVGEGLREFLGLEAGPPKPKPNQQHQDQARGLVLPGYNYLGPGNGLDRGEPVNRADEVAREHDISYNEQLEAGDNPYLKYNHADAEFQEKLADDTSFGGNLGKAVFQAKKRVLEPFGLVEEGAKTAPTGKRIDDHFPKRKKARTEEDSKPSTSSDAEAGPSGSQQLQIPAQPASSLGADTMSAGGGGPLGDNNQGADGVGNASGDWHCDSTWMGDRVVTKSTRTWVLPSYNNHQYREIKSGSVDGSNANAYFGYSTPWGYFDFNRFHSHWSPRDWQRLINNYWGFRPRSLRVKIFNIQVKEVTVQDSTTTIANNLTSTVQVFTDDDYQLPYVVGNGTEGCLPAFPPQVFTLPQYGYATLNRDNTENPTERSSFFCLEYFPSKMLRTGNNFEFTYNFEEVPFHSSFAPSQNLFKLANPLVDQYLYRFVSTNNTGGVQFNKNLAGRYANTYKNWFPGPMGRTQGWNLGSGVNRASVSAFATTNRMELEGASYQVPPQPNGMTNNLQGSNTYALENTMIFNSQGANPGTTATYLEGNMLITSESETQPVNRVAYNVGGQMATNNQSSTTAPATGTYNLQEIVPGSVWMERDVYLQGPIWAKIPETGAHFHPSPAMGGFGLKHPPPMMLIKNTPVPGNITSFSDVPVSSFITQYSTGQVTVEMEWELKKENSKRWNPEIQYTNNYNDPQFVDFAPDSTGEYRTTRPIGTRYLTRPL

SEQ ID NO: 1186 - DNA, 2194 bp, Artificial Sequence
  source: /note="Description of Artificial Sequence: Synthetic polynucleotide"
atgtcttttgttgatcaccctccagattggttggaagaagttggtgaaggtcttcgcgagtttttgggccttgaagcgggcccaccgaaaccaaaacccaatcagcagcatcaagatcaagcccgtggtcttgtgctgcctggttataactatctcggacccggaaacggtctcgatcgaggagagcctgtcaacagggcagacgaggtcgcgcgagagcacgacatctcgtacaacgagcagcttgaggcgggagacaacccctacctcaagtacaaccacgcggacgccgagtttcaggagaagctcgccgacgacacatccttcgggggaaacctcggaaaggcagtctttcaggccaagaaaagggttctcgaaccttttggcctggttgaagagggtgctaagacggcccctaccggaaagcggatagacgaccactttccaaaaagaaagaaggctcggaccgaagaggactccaagccttccacctcgtcagacgccgaagctggacccagcggatcccagcagctgcaaatcccagcccaaccagcctcaagtttgggagctgatacaatgtctgcgggaggtggcggcccattgggcgacaataaccaaggtgccgatggagtgggcaatgcctcgggagattggcattgcgattccacgtggatgggggacagagtcgtcaccaagtccacccgaacctgggtgctgcccagctacaacaaccaccagtaccgagagatcaaaagcggctccgtcgacggaagcaacgccaacgcctactttggatacagcaccccctgggggtactttgactttaaccgcttccacagccactggagcccccgagactggcaaagactcatcaacaactactggggcttcagaccccggtccctcagagtcaaaatcttcaacattcaagtcaaagaggtcacggtgcaggactccaccaccaccatcgccaacaacctcacctccaccgtccaagtgtttacggacgacgactaccagctgccctacgtcgtcggcaacgggaccgagggatgcctgccggccttccctccgcaggtctttacgctgccgcagtacggttacgcgacgctgaaccgcgacaacacagaaaatcccaccgagaggagcagcttcttctgcctagagtactttcccagcaagatgctgagaacgggcaacaactttgagtttacctacaactttgaggaggtgcccttccactccagcttcgctcccagtcagaacctgttcaagctggccaacccgctggtggaccagtacttgtaccgcttcgtgagcacaaataacactggcggagtccagttcaacaagaacctggccgggagatacgccaacacctacaaaaactggttcccggggcccatgggccgaacccagggctggaacctgggctccggggtcaaccgcgccagtgtcagcgccttcgccacgaccaataggatggagctcgagggcgcgagttaccaggtgcccccgcagccgaacggcatgaccaacaacctccagggcagcaacacctatgccctggagaacactatgatcttcgggaagcaaggctcagagaaaacaaatgtggacattgaaaaggtcatgatcaccagcgagagcgagacgcagccggtgaaccgcgtggcgtacaacgtcggcgggcagatggccaccaacaaccagagctccaccactgcccccgcgaccggcacgtacaacctccaggaaatcgtgcccggcagcgtgtggatggagagggacgtgtacctccaaggacccatctgggccaagatcccagagacgggggcgcactttcacccctctccggccatgggcggattcggactcaaacacccaccgcccatgatgctcatcaagaacacgcctgtgcccggaaatatcaccagcttctcggacgtgcccgtcagcagcttcatcacccagtacagcaccgggcaggtcaccgtggagatggagtgggagctcaagaaggaaaactccaagaggtggaacccagagatccagtacacaaacaactacaacgacccccagtttgtggactttgccccggacagcaccggggaatacagaaccaccagacctatcggaacccgataccttacccgacccctttaacccattcatgtcgcataccctcaataaa

SEQ ID NO: 1187 - protein, 721 aa, Artificial Sequence
  source: /note="Description of Artificial Sequence: Synthetic polypeptide"
MSFVDHPPDWLEEVGEGLREFLGLEAGPPKPKPNQQHQDQARGLVLPGYNYLGPGNGLDRGEPVNRADEVAREHDISYNEQLEAGDNPYLKYNHADAEFQEKLADDTSFGGNLGKAVFQAKKRVLEPFGLVEEGAKTAPTGKRIDDHFPKRKKARTEEDSKPSTSSDAEAGPSGSQQLQIPAQPASSLGADTMSAGGGGPLGDNNQGADGVGNASGDWHCDSTWMGDRVVTKSTRTWVLPSYNNHQYREIKSGSVDGSNANAYFGYSTPWGYFDFNRFHSHWSPRDWQRLINNYWGFRPRSLRVKIFNIQVKEVTVQDSTTTIANNLTSTVQVFTDDDYQLPYVVGNGTEGCLPAFPPQVFTLPQYGYATLNRDNTENPTERSSFFCLEYFPSKMLRTGNNFEFTYNFEEVPFHSSFAPSQNLFKLANPLVDQYLYRFVSTNNTGGVQFNKNLAGRYANTYKNWFPGPMGRTQGWNLGSGVNRASVSAFATTNRMELEGASYQVPPQPNGMTNNLQGSNTYALENTMIFGKQGSEKTNVDIEKVMITSESETQPVNRVAYNVGGQMATNNQSSTTAPATGTYNLQEIVPGSVWMERDVYLQGPIWAKIPETGAHFHPSPAMGGFGLKHPPPMMLIKNTPVPGNITSFSDVPVSSFITQYSTGQVTVEMEWELKKENSKRWNPEIQYTNNYNDPQFVDFAPDSTGEYRTTRPIGTRYLTRPL

SEQ ID NO: 1188 - protein, 519 aa, Artificial Sequence
  source: /note="Description of Artificial Sequence: Synthetic polypeptide"
DGVGSSSGNWHCDSTWLGDRVITTSTRTWALPTYNNHLYKQISNGTSGGATNDNTYFGYSTPWGYFDFNRFHCHFSPRDWQRLINNNWGFRPKRLSFKLFNIQVKEVTQNEGTKTIANNLTSTIQVFTDSEYQLPYVLGSAHQGCLPPFPADVFMIPQYGYLTLNNGSQAVGRSSFYCLEYFPSQMLRTGNNFQFTYTFEDVPFHSSYAHSQSLDRLMNPLIDQYLYYLSRTQTTGGTANTQTLGFSQGGPNTMANQAKNWLPGPCYRQQRVSTTTGQNNNSNFAWTAGTKYHLNGRNSLANPGIAMATHKDDEERFFPSNGILIFGKQNAARDNADYSDVMLTSEEEIKTTNPVATEEYGIVADNLQQQNTAPQIGTVNSQGALPGMVWQNRDVYLQGPIWAKIPHTDGNFHPSPLMGGFGLKHPPPQILIKNTPVPADPPTTFNQSKLNSFITQYSTGQVSVEIEWELQKENSKRWNPEIQYTSNYYKSTSVDFAVNTEGVYSEPRPIGTRYLTRNL

SEQ ID NO: 1189 - protein, 738 aa, Artificial Sequence
  source: /note="Description of Artificial Sequence: Synthetic polypeptide"
MAADGYLPDWLEDNLSEGIREWWALQPGAPKPKANQQHQDNARGLVLPGYKYLGPGNGLDKGEPVNAADAAALEHDKAYDQQLKAGDNPYLKYNHADAEFQERLKEDTSFGGNLGRAVFQAKKRLLEPLGLVEEAAKTAPGKKRPVEPSPQRSPDSSTGIGKKGQQPARKRLNFGQTGDSESVPDPQPLGEPPAAPSGVGPNTMAAGGGAPMADNNEGADGVGSSSGNWHCDSTWLGDRVITTSTRTWALPTYNNHLYKQISNGTSGGATNDNTYFGYSTPWGYFDFNRFHCHFSPRDWQRLINNNWGFRPKRLSFKLFNIQVKEVTQNEGTKTIANNLTSTIQVFTDSEYQLPYVLGSAHQGCLPPFPADVFMIPQYGYLTLNNGSQAVGRSSFYCLEYFPSQMLRTGNNFQFTYTFEDVPFHSSYAHSQSLDRLMNPLIDQYLYYLSRTQTTGGTANTQTLGFSQGGPNTMANQAKNWLPGPCYRQQRVSTTTGQNNNSNFAWTAGTKYHLNGRNSLANPGIAMATHKDDEERFFPSNGILIFGKQNAARDNADYSDVMLTSEEEIKTTNPVATEEYGIVADNLQQQNTAPQIGTVNSQGALPGMVWQNRDVYLQGPIWAKIPHTDGNFHPSPLMGGFGLKHPPPQILIKNTPVPADPPTTFNQSKLNSFITQYSTGQVSVEIEWELQKENSKRWNPEIQYTSNYYKSTSVDFAVNTEGVYSEPRPIGTRYLTRNL

SEQ ID NO: 1190 - protein, 725 aa, Artificial Sequence
  source: /note="Description of Artificial Sequence: Synthetic polypeptide"
MAADGYLPDWLEDNLSEGIREWWALQPGAPKPKANQQHQDNARGLVLPGYKYLGPGNGLDKGEPVNAADAAALEHDKAYDQQLKAGDNPYLKYNHADAEFQERLKEDTSFGGNLGRAVFQAKKRLLEPLGLVEEAAKTAPTGKRIDDHFPKRKKARTEEDSKPSTSSDAEAGPSGSQQLQIPAQPASSLGADTMSAGGGGPLGDNNQGADGVGNASGDWHCDSTWMGDRVVTKSTRTWVLPSYNNHQYREIKSGSVDGSNANAYFGYSTPWGYFDFNRFHSHWSPRDWQRLINNYWGFRPRSLRVKIFNIQVKEVTVQDSTTTIANNLTSTVQVFTDDDYQLPYVVGNGTEGCLPAFPPQVFTLPQYGYATLNRDNTENPTERSSFFCLEYFPSKMLRTGNNFEFTYNFEEVPFHSSFAPSQNLFKLANPLVDQYLYRFVSTNNTGGVQFNKNLAGRYANTYKNWFPGPMGRTQGWNLGSGVNRASVSAFATTNRMELEGASYQVPPQPNGMTNNLQGSNTYALENTMIFNSQPANPGTTATYLEGNMLITSESETQPVNRVAYNVGGQMATNNQSSTTAPATGTYNLQEIVPGSVWMERDVYLQGPIWAKIPETGAHFHPSPAMGGFGLKHPPPMMLIKNTPVPGNITSFSDVPVSSFITQYSTGQVTVEMEWELKKENSKRWNPEIQYTNNYNDPQFVDFAPDSTGEYRTTRPIGTRYLTRPL

SEQ ID NO: 1191 - protein, 736 aa, Artificial Sequence
  source: /note="Description of Artificial Sequence: Synthetic polypeptide"
MAADGYLPDWLEDNLSEGIREWWALKPGAPKPKANQQKQDDGRGLVLPGYKYLGPFNGLDKGEPVNAADAAALEHDKAYDQQLQAGDNPYLRYNHADAEFQERLQEDTSFGGNLGRAVFQAKKRVLEPLGLVEEGAKTAPGKKRPVDQSPQEPDSSSGVGKSGKQPARKRLNFGQTGDSESVPDPQPLGEPPAAPTSLGSNTMASGGGAPMADNNEGADGVGNSSGNWHCDSQWLGDRVITTSTRTWALPTYNNHLYKQISSQSGASNDNHYFGYSTPWGYFDFNRFHCHFSPRDWQRLINNNWGFRPKKLSFKLFNIQVKEVTQNDGTTTIANNLTSTVQVFTDSEYQLPYVLGSAHQGCLPPFPADVFMVPQYGYLTLNNGSQAVGRSSFYCLEYFPSQMLRTGNNFQFSYTFEDVPFHSSYAHSQSLDRLMNPLIDQYLYYLNRTQGTTSGTTNQSRLLFSQAGPQSMSLQARNWLPGPCYRQQRLSKTANDNNNSNFPWTAASKYHLNGRDSLVNPGPAMASHKDDEEKFFPMHGNLIFGKEGTTASNAELDNVMITDEEEIRTTNPVATEQYGTVANNLQSSNTAPTTRTVNDQGALPGMVWQDRDVYLQGPIWAKIPHTDGHFHPSPLMGGFGLKHPPPQIMIKNTPVPANPPTTFSPAKFASFITQYSTGQVSVEIEWELQKENSKRWNPEIQYTSNYNKSVNVDFTVDTNGVYSEPRPIGTRYLTRNL

SEQ ID NO: 1192 - protein, 735 aa, Artificial Sequence
  source: /note="Description of Artificial Sequence: Synthetic polypeptide"
MSFVDHPPDWLEEVGEGLREFLGLEAGPPKPKPNQQHQDQARGLVLPGYNYLGPGNGLDRGEPVNRADEVAREHDISYNEQLEAGDNPYLKYNHADAEFQEKLADDTSFGGNLGKAVFQAKKRVLEPFGLVEEGAKTAPGKKRPVDQSPQEPDSSSGVGKSGKQPARKRLNFGQTGDSESVPDPQPLGEPPAAPTSLGSNTMASGGGAPMADNNEGADGVGNSSGNWHCDSQWLGDRVITTSTRTWALPTYNNHLYKQISSQSGASNDNHYFGYSTPWGYFDFNRFHCHFSPRDWQRLINNNWGFRPKKLSFKLFNIQVKEVTQNDGTTTIANNLTSTVQVFTDSEYQLPYVLGSAHQGCLPPFPADVFMVPQYGYLTLNNGSQAVGRSSFYCLEYFPSQMLRTGNNFQFSYTFEDVPFHSSYAHSQSLDRLMNPLIDQYLYYLNRTQGTTSGTTNQSRLLFSQAGPQSMSLQARNWLPGPCYRQQRLSKTANDNNNSNFPWTAASKYHLNGRDSLVNPGPAMASHKDDEEKFFPMHGNLIFGKEGTTASNAELDNVMITDEEEIRTTNPVATEQYGTVANNLQSSNTAPTTRTVNDQGALPGMVWQDRDVYLQGPIWAKIPHTDGHFHPSPLMGGFGLKHPPPQIMIKNTPVPANPPTTFSPAKFASFITQYSTGQVSVEIEWELQKENSKRWNPEIQYTSNYNKSVNVDFTVDTNGVYSEPRPIGTRYLTRPL

SEQ ID NO: 1193 - protein, 736 aa, Artificial Sequence
  source: /note="Description of Artificial Sequence: Synthetic polypeptide"
MAADGYLPDWLEDNLSEGIREWWALKPGAPKPKANQQKQDDGRGLVLPGYKYLGPFNGLDKGEPVNAADAAALEHDKAYDQQLQAGDNPYLRYNHADAEFQERLQEDTSFGGNLGRAVFQAKKRVLEPLGLVEEGAKTAPGKKRPVEPSPQRSPDSSTGIGKKGQQPARKRLNFGQTGDSESVPDPQPLGEPPAAPSGVGPNTMAAGGGAPMADNNEGADGVGSSSGNWHCDSTWLGDRVITTSTRTWALPTYNNHLYKQISSQSGASNDNHYFGYSTPWGYFDFNRFHCHFSPRDWQRLINNNWGFRPKRLSFKLFNIQVKEVTQNEGTKTIANNLTSTIQVFTDSEYQLPYVLGSAHQGCLPPFPADVFMIPQYGYLTLNNGSQAVGRSSFYCLEYFPSQMLRTGNNFQFTYTFEDVPFHSSYAHSQSLDRLMNPLIDQYLYYLSRTQTTGGTANTQTLGFSQGGPNTMANQAKNWLPGPCYRQQRVSTTTGQNNNSNFAWTAGTKYHLNGRNSLANPGIAMATHKDDEERFFPSNGILIFGKQGTTASNAELDNVMITDEEEIKTTNPVATEEYGIVADNLQQQNTAPQIGTVNSQGALPGMVWQNRDVYLQGPIWAKIPHTDGNFHPSPLMGGFGLKHPPPQILIKNTPVPADPPTTFNQSKLNSFITQYSTGQVSVEIEWELQKENSKRWNPEIQYTSNYNKSVNVDFTVDTNGVYSEPRPIGTRYLTRNL

SEQ ID NO: 1194 - protein, 736 aa, Artificial Sequence
  source: /note="Description of Artificial Sequence: Synthetic polypeptide"
MAADGYLPDWLEDNLSEGIREWWALKPGAPKPKANQQKQDDGRGLVLPGYKYLGPFNGLDKGEPVNAADAAALEHDKAYDQQLQAGDNPYLRYNHADAEFQERLQEDTSFGGNLGRAVFQAKKRVLEPLGLVEEGAKTAPGKKRPVEPSPQRSPDSSTGIGKKGQQPARKRLNFGQTGDSESVPDPQPLGEPPAAPSGVGPNTMAAGGGAPMADNNEGADGVGSSSGNWHCDSTWLGDRVITTSTRTWALPTYNNHLYKQISSQSGASNDNHYFGYSTPWGYFDFNRFHCHFSPRDWQRLINNNWGFRPKRLSFKLFNIQVKEVTQNEGTKTIANNLTSTIQVFTDSEYQLPYVLGSAHQGCLPPFPADVFMIPQYGYLTLNNGSQAVGRSSFYCLEYFPSQMLRTGNNFQFTYTFEDVPFHSSYAHSQSLDRLMNPLIDQYLYYLSRTQTTGGTANTQTLGFSQGGPNTMANQAKNWLPGPCYRQQRVSTTTGQNNNSNFAWTAGTKYHLNGRNSLANPGIAMATHKDDEERFFPSNGILIFGKQNAARDNADYSDVMLTSEEEIKTTNPVATEEYGIVADNLQQQNTAPQIGTVNSQGALPGMVWQNRDVYLQGPIWAKIPHTDGNFHPSPLMGGFGLKHPPPQILIKNTPVPADPPTTFNQSKLNSFITQYSTGQVSVEIEWELQKENSKRWNPEIQYTSNYYKSTSVDFAVNTEGVYSEPRPIGTRYLTRNL

SEQ ID NO: 1195 - protein, 736 aa, Artificial Sequence
  source: /note="Description of Artificial Sequence: Synthetic polypeptide"
MAADGYLPDWLEDNLSEGIREWWDLKPGAPKPKANQQKQDDGRGLVLPGYKYLGPFNGLDKGEPVNAADAAALEHDKAYDQQLKAGDNPYLRYNHADAEFQERLQEDTSFGGNLGRAVFQAKKRVLEPLGLVEEGAKTAPGKKRPVEQSPQEPDSSSGIGKTGQQPAKKRLNFGQTGDTESVPDPQPLGEPPAAPSGLGPNTMASGGGAPMADNNEGADGVGNSSGNWHCDSTWLGDRVITTSTRTWALPTYNNHLYKQISNGTSGGSTNDNTYFGYSTPWGYFDFNRFHCHFSPRDWQRLINNNWGFRPKRLNFKLFNIQVKEVTTNEGTKTIANNLTSTVQVFTDSEYQLPYVLGSAHQGCLPPFPADVFMVPQYGYLTLNNGSQALGRSSFYCLEYFPSQMLRTGNNFQFSYTFEDVPFHSSYAHSQSLDRLMNPLIDQYLYYLVRTQTTGTGGTQTLAFSQAGPSSMASQARNWVPGPSYRQQRVSTTTNQNNNSNFAWTGAAKFKLNGRDSLMNPGVAMASHKDDEDRFFPSSGVLIFGKQGAGNDGVDYSQVLITDEEEIKATNPVATEEYGAVAINNQAANTQAQTGLVHNQGVIPGMVWQNRDVYLQGPIWAKIPHTDGNFHPSPLMGGFGLKHPPPQILIKNTPVPADPPLTFNQAKLNSFITQYSTGQVSVEIEWELQKENSKRWNPEIQYTSNYYKSTNVDFAVNTEGVYSEPRPIGTRYLTRNL

SEQ ID NO: 1196 - DNA, 3695 bp, Artificial Sequence
  source: /note="Description of Artificial Sequence: Synthetic polynucleotide"
ctctttgcgcttgcgttttcccttgtccagatagcccagtagctgacattcatccggggtcagcaccgtttctgcggactggctttctacgtgaaaaggatctaggtgaagatcctttttgataatctcatgcctgacatttatattccccagaacatcaggttaatggcgtttttgatgtcattttcgcggtggctgagatcagccacttcttccccgataacggagaccggcacactggccatatcggtggtcatcatgcgccagctttcatccccgatatgcaccaccgggtaaagttcacgggagactttatctgacagcagacgtgcactggccagggggatcaccatccgtcgccccggcgtgtcaataatatcactctgtacatccacaaacagacgataacggctctctcttttataggtgtaaaccttaaactgccgtacgtataggctgcgcaactgttgggaagggcgatcggtgcgggcctcttcgctattacgccagctggcgaaagggggatgtgctgcaaggcgattaagttgggtaacgccagggttttcccagtcacgacgttgtaaaacgacggccagtgaattgtaatacgactcactatagggcgaattgaatttagcggccgcgaattcgcccttatgatatctggtgggaggagggcaagatgacggccaaggtcgtggagtccgccaaggccattctcggcggcagcaaagtgcgcgtggaccaaaagtgcaagtcgtccgcccagatcgatcccactcccgtcattgtcacctccaacaccaacatgtgcgccgtgattgacgggaacagcaccaccttcgagcaccagcagccgttgcaggaccggatgttcaaatttgaacttacccgccgtctggagcatgactttggcaaggtgacaaagcaggaagtcaaagagttcttccgctgggcgcaggatcacgtgaccgaggtggcgcatgagttccacgtcagaaagggtggagccaacaagagacccgcccccgatgacgctgataaaagcgagcccaagcgggcctgcccctcagtcgcagatccatcgacgtcagacgcggaaggagctccggtggactttgccgacaggtaccaaaacaaatgttctcgtcacgcgggcatgcttcagatgctgtttccctgcaagacatgcgagagaatgaatcagaatttcaacatttgcttcacgcacgggaccagggactgttcggagtgcttccccggcgtgtcagaatctcaaccggtcgtcagaaaaaggacgtatcggaaactctgtgccattcatcatctgctggggagggctcccgagattgcttgctcggcctgcgatctggtcaacgtggacctggatgactgtgtctctgagcaataaatgacttaaaccaggtatggctgccgatggttatcttccagattggctcgaggacaacctctctgagggcattcgcgagtggtgggacttgaaacctggagccccgaaacccaaagccaaccagcaaaagcaggacgacggccggggtctggtgcttcctggctacaagtacctcggacccttcaacggactcgacaagggggagcccgtcaacgcggcggacgcagcggccctcgagcacgacaaggcctacgaccagcagctcaaagcgggtgacaatccgtacctgcggtataaccacgccgacgccgagtttcaggagcgtctgcaagaagatacgtcttttgggggcaacctcgggcgagcagtcttccaggccaagaagcgggttctcgaacctctcggtctggttgaggaaggcgctaagacggctcctggaaagaagagaccggtagagcagtcaccccaagaaccagactcctcatcgggcatcggcaagacaggccagcagcccgctaaaaagagactcaattttggtcagactggcgacacagagtcagtccccgacccacaacctctcggagaacctccagcagccccctcaggtctgggacctaatacaatggcttcaggcggtggcgctccaatggcagacaataacgaaggcgccgacggagtgggtaattcctcgggaaattggcattgcgattccacatggctgggggacagagtcatcaccaccagcacccgaacctgggccctgcccacctacaacaaccacctctacaagcaaatctccaacggcacctcgggaggaagcaccaacgacaacacctactttggctacagcaccccctgggggtattttgacttcaacagattccactgccacttttcaccacgtgactggcagcgactcatcaacaacaattggggattccggcccaagagactcaacttcaagctcttcaacatccaggtcaaggaagtcacgacgaacgaaggcaccaagaccatcgccaataatctcaccagcaccgtgcaggtctttacggactcggagtaccagctaccgtacgtgctaggatcagctcaccagggatgtctgcctccgttcccggcggacgtcttcatggttcctcagtacggttatctaactctgaacaatggcagccaggccctgggacgttcctccttctactgcctggagtatttcccatcgcagatgctgagaaccggcaacaactttcagttcagctacaccttcgaggacgtgcctttccacagcagctacgcgcacagccaaagcctggacaggctgatgaatcccctcatcgaccagtacctgtattacctggtcagaacgcagacaaccgggactggagggacgcagactctggcattcagccaagcaggccctagctcaatggccagccaggctagaaactgggtgcccggaccgagctaccggcagcagcgcgtctccacgacaaccaaccagaacaacaacagcaactttgcctggacgggagctgccaaatttaaactgaacggccgagactctctaatgaaccccggcgtggccatggcttcacacaaggatgacgaggaccgcttcttcccttctagcggggtcctgattttcggcaagcaaggagccgggaatgatggagtggattacagccaagtgctgattacagatgaggaagaaatcaaggctaccaaccccgtggcaacagaggaatatggagcagtggccatcaacaaccaggccgctaatacgcaggcgcagaccggactcgtgcacaaccagggggtgattcccggcatggtgtggcagaacagagacgtgtacctgcagggtcccatctgggccaaaattcctcacacggacggcaactttcacccgtctcccctgatgggcggctttggactgaagcacccgcctcctcaaattctcatcaagaacacaccggttccagcggacccgccgcttaccttcaaccaggccaagctgaactctttcatcacgcagtacagcaccggacaggtcagcgtggaaatcgagtgggagctgcagaaagaaaacagcaaacgctggaatccagagattcagtacacttccaactactacaaatctacaaatgtggactttgctgtcaacacggaaggagtgtatagcgagcctcgccccattggcacccgttacctcacccgcaacctgtaattgcctgttaatcaataaaccggttaattcgtttcagtaaggaagaattcgtttaaa

SEQ ID NO: 1197 - protein, 736 aa, Artificial Sequence; identical to SEQ ID NO: 516
  source: /note="Description of Artificial Sequence: Synthetic polypeptide"

SEQ ID NO: 1198 - protein, 736 aa, Artificial Sequence
  source: /note="Description of Artificial Sequence: Synthetic polypeptide"
MAADGYLPDWLEDNLSEGIREWWDLKPGAPKPKANQQKQDDGRGLVLPGYKYLGPFNGLDKGEPVNAADAAALEHDKAYDQQLKAGDNPYLRYNHADAEFQERLQEDTSFGGNLGRAVFQAKKRVLEPLGLVEEGAKTAPGKKRPVEQSPQEPDSSSGIGKTGQQPAKKRLNFGQTGDTESVPDPQPLGEPPAAPSGLGPNTMASGGGAPMADNNEGADGVGNSSGNWHCDSTWLGDRVITTSTRTWALPTYNNHLYKQISNGTSGGSTNDNTYFGYSTPWGYFDFNRFHCHFSPRDWQRLINNNWGFRPKRLNFKLFNIQVKEVTTNEGTKTIANNLTSTVQVFTDSEYQLPYVLGSAHQGCLPPFPADVFMVPQYGYLTLNNGSQALGRSSFYCLEYFPSQMLRTGNNFQFSYTFEDVPFHSSYAHSQSLDRLMNPLIDQYLYYLVRTQTTGTGGTQTLAFSQAGPSNMASQARNWVPGPSYRQQRVSTTTNQNNNSNFAWTGAAKFKLNGRDSLMNPGVAMASHKDDEDRFFPSSGVLIFGKQGAGNDGVDYSQVLITDEEEIKATNPVATEEYGAVAINNQAANTQAQTGLVHNQGVIPGMVWQNRDVYLQGPIWAKIPHTDGNFHPSPLMGGFGLKHPPPQILIKNTPVPADPPLTFNQAKLNSFITQYSTGQVSVEIEWELQKENSKRWNPEIQYTSNYYKSTNVDFAVNTEGVYSEPRPIGTRYLTRNL

SEQ ID NO: 1199 - protein, 738 aa, Artificial Sequence; identical to SEQ ID NO: 893
  source: /note="Description of Artificial Sequence: Synthetic polypeptide"

SEQ ID NO: 1200 - protein, 736 aa, Artificial Sequence
  source: /note="Description of Artificial Sequence: Synthetic polypeptide"
MAADGYLPDWLEDNLSEGIREWWALQPGAPKPKANQQHQDNARGLVLPGYKYLGPGNGLDKGEPVNAADAAALEHDKAYDQQLKAGDNPYLKYNHADAEFQERLKEDTSFGGNLGRAVFQAKKRILEPLGLVEEAAKTAPGKKRPVDQSPQEPDSSSGVGKSGKQPARKRLNFGQTGDSESVPDPQPLGEPPAAPTSLGSNTMASGGGAPMADNNEGADGVGNSSGNWHCDSQWLGDRVITTSTRTWALPTYNNHLYKQISSQSGASNDNHYFGYSTPWGYFDFNRFHCHFSPRDWQRLINNNWGFRPKKLSFKLFNIQVKEVTQNDGTTTIANNLTSTVQVFTDSEYQLPYVLGSAHQGCLPPFPADVFMVPQYGYLTLNNGSQAVGRSSFYCLEYFPSQMLRTGNNFQFSYTFEDVPFHSSYAHSQSLDRLMNPLIDQYLYYLNRTQGTTSGTTNQSRLLFSQAGPQSMSLQARNWLPGPCYRQQRLSKTANDNNNSNFPWTAASKYHLNGRDSLVNPGPAMASHKDDEEKFFPMHGNLIFGKEGTTASNAELDNVMITDEEEIRTTNPVATEQYGTVANNLQSSNTAPTTRTVNDQGALPGMVWQDRDVYLQGPIWAKIPHTDGHFHPSPLMGGFGLKHPPPQIMIKNTPVPANPPTTFSPAKFASFITQYSTGQVSVEIEWELQKENSKRWNPEIQYTSNYNKSVNVDFTVDTNGVYSEPRPIGTRYLTRPL

SEQ ID NO: 1201 - protein, 736 aa, Artificial Sequence
  source: /note="Description of Artificial Sequence: Synthetic polypeptide"
MAADGYLPDWLEDNLSEGIREWWALQPGAPKPKANQQHQDNARGLVLPGYKYLGPGNGLDKGEPVNAADAAALEHDKAYDQQLKAGDNPYLKYNHADAEFQERLKEDTSFGGNLGRAVFQAKKRLLEPLGLVEEAAKTAPGKKRPVDQSPQEPDSSSGVGKSGKQPARKRLNFGQTGDSESVPDPQPLGEPPAAPTSLGSNTMASGGGAPMADNNEGADGVGNSSGNWHCDSQWLGDRVITTSTRTWALPTYNNHLYKQISSQSGASNDNHYFGYSTPWGYFDFNRFHCHFSPRDWQRLINNNWGFRPKKLSFKLFNIQVKEVTQNDGTTTIANNLTSTVQVFTDSEYQLPYVLGSAHQGCLPPFPADVFMVPQYGYLTLNNGSQAVGRSSFYCLEYFPSQMLRTGNNFQFSYTFEDVPFHSSYAHSQSLDRLMNPLIDQYLYYLNRTQGTTSGTTNQSRLLFSQAGPQSMSLQARNWLPGPCYRQQRLSKVANDNNNSNFPWTAASKYHLNGRDSLVNPGPAMASHKDDEEKFFPMHGNLIFGKEGTTASNAELDNVMITDEEEIRTTNPVATEQYGTVANNLQSSNTAPTTRTVNDQGALPGMVWQDRDVYLQGPIWAKIPHTDGHFHPSPLMGGFGLKHPPPQIMIKNTPVPANPPTTFVPAKFASFITQYSTGQVSVEIEWELQKENSKRWNPEIQYTSNYNKSVNVDFTVDTNGVYSEPRPIGTRYLTRPL

SEQ ID NO: 1202 - protein, 736 aa, Artificial Sequence
  source: /note="Description of Artificial Sequence: Synthetic polypeptide"
  VARIANT (168)..(168): /replace="Arg"
  VARIANT (204)..(204): /replace="Ser"
  VARIANT (266)..(266): /replace="Gly"
  VARIANT (311)..(311): /replace="Lys"
  VARIANT (411)..(411): /replace="Gln"
  VARIANT (460)..(460): /replace="Glu"
  VARIANT (493)..(493): /replace="Thr"
  VARIANT (562)..(562): /replace="Asn"
  VARIANT (576)..(576): /replace="Glu"
  VARIANT (587)..(587): /replace="Ala"
  VARIANT (609)..(609): /replace="Asp"
  SITE (1)..(736): /note="Variant residues given in the sequence have no preference with respect to those in the annotations for variant positions"
MAADGYLPDWLEDNLSEGIREWWDLKPGAPKPKANQQKQDDGRGLVLPGYKYLGPFNGLDKGEPVNAADAAALEHDKAYDQQLKAGDNPYLRYNHADAEFQERLQEDTSFGGNLGRAVFQAKKRVLEPLGLVEEGAKTAPGKKRPVEQSPQEPDSSSGIGKKGQQPAKKRLNFGQTGDSESVPDPQPLGEPPAAPSGVGSNTMAAGGGAPMADNNEGADGVGNASGNWHCDSTWLGDRVITTSTRTWALPTYNNHLYKQISSQSGASTNDNTYFGYSTPWGYFDFNRFHCHFSPRDWQRLINNNWGFRPKRLNFKLFNIQVKEVTTNDGTTTIANNLTSTVQVFTDSEYQLPYVLGSAHQGCLPPFPADVFMIPQYGYLTLNNGSQAVGRSSFYCLEYFPSQMLRTGNNFEFSYTFEDVPFHSSYAHSQSLDRLMNPLIDQYLYYLSRTQTTSGTAGNRTLQFSQAGPSSMANQAKNWLPGPCYRQQRVSKTANQNNNSNFAWTGATKYHLNGRDSLVNPGPAMATHKDDEDKFFPMSGVLIFGKQGAGNSNVDLDNVMITSEEEIKTTNPVATEQYGTVATNLQSSNTAPATGTVNSQGALPGMVWQNRDVYLQGPIWAKIPHTDGHFHPSPLMGGFGLKHPPPQILIKNTPVPANPPTTFSPAKFASFITQYSTGQVSVEIEWELQKENSKRWNPEIQYTSNYNKSTNVDFAVDTNGVYSEPRPIGTRYLTRNL

SEQ ID NO: 1203 - DNA, 2208 bp, Artificial Sequence; identical to SEQ ID NO: 911
  source: /note="Description of Artificial Sequence: Synthetic polynucleotide"
  Variation (502)..(504): /replace="aaa"
  Variation (610)..(612): /replace="agc"
  Variation (796)..(798): /replace="ggc"
  Variation (931)..(933): /replace="aag"
  Variation (1231)..(1233): /replace="cag"
  Variation (1378)..(1380): /replace="gag"
  Variation (1477)..(1479): /replace="acc"
  Variation (1684)..(1686): /replace="aac"
  Variation (1726)..(1728): /replace="gag"
  Variation (1759)..(1761): /replace="gcc"
  Variation (1825)..(1827): /replace="gac"
  misc_feature (1)..(2208): /note="Variant nucleotides given in the sequence have no preference with respect to those in the annotations for variant positions"

SEQ ID NO: 1204 - protein, 737 aa, Artificial Sequence
  source: /note="Description of Artificial Sequence: Synthetic polypeptide"
  VARIANT (157)..(157): /replace="Ser"
  VARIANT (168)..(168): /replace="Arg"
  VARIANT (262)..(262): /replace="Ser"
  VARIANT (263)..(263): /replace="His"
  VARIANT (312)..(312): /replace="Lys"
  VARIANT (412)..(412): /replace="Gln"
  VARIANT (460)..(460): /replace="Gln"
  VARIANT (461)..(461): /replace="Glu"
  VARIANT (552)..(552): /replace="Ser"
  VARIANT (556)..(556): /replace="Tyr"
  VARIANT (557)..(557): /replace="Ser"
  VARIANT (563)..(563): /replace="Asn"
  VARIANT (580)..(580): /replace="Ile"
  VARIANT (588)..(588): /replace="Ser"
  VARIANT (664)..(664): /replace="Thr"
  SITE (1)..(737): /note="Variant residues given in the sequence have no preference with respect to those in the annotations for variant positions"
MAADGYLPDWLEDNLSEGIREWWDLKPGAPKPKANQQKQDDGRGLVLPGYKYLGPFNGLDKGEPVNAADAAALEHDKAYDQQLKAGDNPYLRYNHADAEFQERLQEDTSFGGNLGRAVFQAKKRVLEPLGLVEEGAKTAPGKKRPVEQSPQEPDSSTGIGKKGQQPAKKRLNFGQTGDSESVPDPQPLGEPPAAPSGVGSNTMAAGGGAPMADNNEGADGVGNASGNWHCDSTWLGDRVITTSTRTWALPTYNNHLYKQISNSQSGGSTNDNTYFGYSTPWGYFDFNRFHCHFSPRDWQRLINNNWGFRPKRLNFKLFNIQVKEVTTNDGTTTIANNLTSTVQVFTDSEYQLPYVLGSAHQGCLPPFPADVFMIPQYGYLTLNNGSQAVGRSSFYCLEYFPSQMLRTGNNFEFSYTFEDVPFHSSYAHSQSLDRLMNPLIDQYLYYLSRTQTTGGTAGNRTLQFSQAGPSSMANQAKNWLPGPCYRQQRVSKTTNQNNNSNFAWTGATKYHLNGRDSLVNPGVAMATHKDDEDRFFPSSGVLIFGKQGAGNDNVDLDNVMITSEEEIKTTNPVATEEYGVVATNLQSNNTAPQTGTVNSQGALPGMVWQNRDVYLQGPIWAKIPHTDGNFHPSPLMGGFGLKHPPPQILIKNTPVPANPPTTFSPAKFASFITQYSTGQVSVEIEWELQKENSKRWNPEIQYTSNYNKSTNVDFAVDTEGVYSEPRPIGTRYLTRNL

SEQ ID NO: 1205 - DNA, 2211 bp, Artificial Sequence
  source: /note="Description of Artificial Sequence: Synthetic polynucleotide"
  Variation (469)..(471): /replace="agc"
  Variation (502)..(504): /replace="aag"
  Variation (784)..(786): /replace="agt"
  Variation (787)..(789): /replace="cac"
  Variation (934)..(936): /replace="aag"
  Variation (1234)..(1236): /replace="cag"
  Variation (1378)..(1380): /replace="cag"
  Variation (1381)..(1383): /replace="gag"
  Variation (1654)..(1656): /replace="agc"
  Variation (1666)..(1668): /replace="tac"
  Variation (1669)..(1671): /replace="agc"
  Variation (1687)..(1689): /replace="aac"
  Variation (1738)..(1740): /replace="atc"
  Variation (1762)..(1764): /replace="agc"
  Variation (1990)..(1992): /replace="acc"
  misc_feature (1)..(2211): /note="Variant nucleotides given in the sequence have no preference with respect to those in the annotations for variant positions"
atggctgccgatggttatcttccagattggctcgaggacaacctctctgagggcattcgcgagtggtgggacttgaaacctggagccccgaaacccaaagccaaccagcaaaagcaggacgacggccggggtctggtgcttcctggctacaagtacctcggacccttcaacggactcgacaagggggagcccgtcaacgcggcggacgcagcggccctcgagcacgacaaggcctacgaccagcagctcaaagcgggtgacaatccgtacctgcggtataaccacgccgacgccgagtttcaggagcgtctgcaagaagatacgtcttttgggggcaacctcgggcgagcagtcttccaggccaagaagcgggttctcgaacctctcggtctggttgaggaaggcgctaagacggctcctggaaagaagagaccggtagagcaatcaccccaggaaccagactcctctacgggcatcggcaagaaaggccagcagcccgcgaaaaagagactcaactttgggcagactggcgactcagagtcagtgcccgaccctcaaccactcggagaaccccccgcagccccctctggtgtgggatctaatacaatggctgcaggcggtggcgctccaatggcagacaataacgaaggcgccgacggagtgggtaatgcctcaggaaattggcattgcgattccacatggctgggcgacagagtcatcaccaccagcacccgaacctgggccctccccacctacaacaaccacctctacaagcaaatctccaacagccaatcgggaggaagcaccaacgacaacacctacttcggctacagcaccccctgggggtattttgactttaacagattccactgccacttctcaccacgtgactggcagcgactcatcaacaacaactggggattccggcccaagagactcaacttcaagctcttcaacatccaggtcaaggaggtcacgacgaatgatggcaccacgaccatcgccaataaccttaccagcacggttcaggtctttacggactcggaataccagctcccgtacgtcctcggctctgcgcaccagggctgcctgcctccgttcccggcggacgtcttcatgattcctcagtacgggtacctgactctgaacaatggcagtcaggccgtgggccgttcctccttctactgcctggagtactttccttctcaaatgctgagaacgggcaacaactttgagttcagctacacgtttgaggacgtgccttttcacagcagctacgcgcacagccaaagcctggaccggctgatgaaccccctcatcgaccagtacctgtactacctgtctcggactcagaccacgggaggtaccgcaggaaatcggacgttgcaattttctcaggccgggcctagtagcatggcgaatcaggccaaaaactggctacccgggccctgctaccggcagcaacgcgtctccaagacaacgaatcaaaataacaacagcaactttgcctggaccggtgccaccaagtatcatctgaatggcagagactctctggtaaatcccggtgtcgctatggcaacccacaaggacgacgaagaccgattttttccgtccagcggagtcttaatatttgggaaacagggagctggaaatgacaacgtggaccttgacaacgttatgataaccagtgaggaagaaattaaaaccaccaacccagtggccacagaagagtacggcgtggtggccactaacctgcaatcggcaaacaccgctcctcaaacagggaccgtcaacagtcaaggagccttacctggcatggtctggcagaaccgggacgtgtacctgcagggtcctatctgggccaagattcctcacacggacggaaactttcatccctcgccgctgatgggaggctttggactgaaacacccgcctcctcagatcctgattaagaatacacctgttcccgcgaatcctccaactaccttcagtccagctaagtttgcgtcgttcatcacgcagtacagcaccggacaggtcagcgtggaaattgaatgggagctgcagaaagaaaacagcaaacgctggaacccagagattcaatacacttccaactacaacaaatctacaaatgtggactttgctgttgacacagaaggcgtttattctgagcctcgccccatcggcacccgttacctcacccgtaatctg

SEQ ID NO: 1206 - protein, 738 aa, Artificial Sequence
  source: /note="Description of Artificial Sequence: Synthetic polypeptide"
  VARIANT (158)..(158): /replace="Ser"
  VARIANT (169)..(169): /replace="Arg"
  VARIANT (564)..(564): /replace="Asn"
  SITE (1)..(738): /note="Variant residues given in the sequence have no preference with respect to those in the annotations for variant positions"
MAADGYLPDWLEDNLSEGIREWWDLKPGAPKPKANQQKQDDGRGLVLPGYKYLGPFNGLDKGEPVNAADAAALEHDKAYDQQLKAGDNPYLRYNHADAEFQERLQEDTSFGGNLGRAVFQAKKRVLEPLGLVEEGAKTAPGKKRPVEQSPQREPDSSTGIGKKGQQPAKKRLNFGQTGDSESVPDPQPLGEPPAAPSGVGSNTMAAGGGAPMADNNEGADGVGNSSGNWHCDSTWLGDRVITTSTRTWALPTYNNHLYKQISNGTSGGSTNDNTYFGYSTPWGYFDFNRFHCHFSPRDWQRLINNNWGFRPKRLNFKLFNIQVKEVTTNEGTKTIANNLTSTVQVFTDSEYQLPYVLGSAHQGCLPPFPADVFMIPQYGYLTLNNGSQAVGRSSFYCLEYFPSQMLRTGNNFQFSYTFEDVPFHSSYAHSQSLDRLMNPLIDQYLYYLSRTQTTGGTAGTQTLQFSQAGPSSMANQAKNWLPGPCYRQQRVSTTTNQNNNSNFAWTGATKYHLNGRDSLVNPGVAMATHKDDEDRFFPSSGVLIFGKQGAGNDNVDYSNVMITSEEEIKTTNPVATEEYGVVATNLQSANTAPQTGTVNSQGALPGMVWQNRDVYLQGPIWAKIPHTDGNFHPSPLMGGFGLKHPPPQILIKNTPVPADPPTTFNQAKLNSFITQYSTGQVSVEIEWELQKENSKRWNPEIQYTSNYYKSTNVDFAVNTEGVYSEPRPIGTRYLTRNL

SEQ ID NO: 1207 - DNA, 2214 bp, Artificial Sequence; identical to SEQ ID NO: 915
  source: /note="Description of Artificial Sequence: Synthetic polynucleotide"
  Variation (472)..(474): /replace="agc"
  Variation (505)..(507): /replace="aga"
  Variation (1690)..(1692): /replace="aac"
  misc_feature (1)..(2214): /note="Variant nucleotides given in the sequence have no preference with respect to those in the annotations for variant positions"

SEQ ID NO: 1208 - protein, 738 aa, Artificial Sequence
  source: /note="Description of Artificial Sequence: Synthetic polypeptide"
  VARIANT (158)..(158): /replace="Ser"
  VARIANT (169)..(169): /replace="Lys"
  VARIANT (315)..(315): /replace="Ser"
  VARIANT (413)..(413): /replace="Glu"
  VARIANT (472)..(472): /replace="Thr" or "Ser"
  VARIANT (534)..(534): /replace="Glu"
  VARIANT (542)..(542): /replace="Val"
  VARIANT (595)..(595): /replace="Val"
  SITE (1)..(738): /note="Variant residues given in the sequence have no preference with respect to those in the annotations for variant positions"
MAADGYLPDWLEDNLSEGIREWWDLKPGAPKPKANQQKQDDGRGLVLPGYKYLGPFNGLDKGEPVNAADAAALEHDKAYDQQLKAGDNPYLRYNHADAEFQERLQEDTSFGGNLGRAVFQAKKRVLEPLGLVEEGAKTAPGKKRPVEQSPQREPDSSTGIGKKGQQPARKRLNFGQTGDSESVPDPQPLGEPPAAPSGVGSNTMAAGGGAPMADNNEGADGVGSSSGNWHCDSTWLGDRVITTSTRTWALPTYNNHLYKQISNGTSGGSTNDNTYFGYSTPWGYFDFNRFHCHFSPRDWQRLINNNWGFRPKRLNFKLFNIQVKEVTQNEGTKTIANNLTSTIQVFTDSEYQLPYVLGSAHQGCLPPFPADVFMIPQYGYLTLNNGSQAVGRSSFYCLEYFPSQMLRTGNNFQFSYTFEDVPFHSSYAHSQSLDRLMNPLIDQYLYYLSRTQTTGGTAGTQTLQFSQAGPSNMANQAKNWLPGPCYRQQRVSTTTSQNNNSNFAWTGATKYHLNGRDSLVNPGVAMATHKDDEDRFFPSSGILIFGKQGAGKDNVDYSNVMLTSEEEIKTTNPVATEEYGVVADNLQQQNTAPQIGTVNSQGALPGMVWQNRDVYLQGPIWAKIPHTDGNFHPSPLMGGFGLKHPPPQILIKNTPVPADPPTTFNQAKLNSFITQYSTGQVSVEIEWELQKENSKRWNPEIQYTSNYYKSTNVDFAVNTEGVYSEPRPIGTRYLTRNL

SEQ ID NO: 1209 - DNA, 2214 bp, Artificial Sequence; identical to SEQ ID NO: 917
  source: /note="Description of Artificial Sequence: Synthetic polynucleotide"
  Variation (472)..(474): /replace="agc"
  Variation (505)..(507): /replace="aag"
  Variation (943)..(945): /replace="agc"
  Variation (1237)..(1239): /replace="gaa"
  Variation (1414)..(1416): /replace="acc" or "agc"
  Variation (1600)..(1602): /replace="gag"
  Variation (1624)..(1626): /replace="gtc"
  Variation (1783)..(1785): /replace="gta"
  misc_feature (1)..(2214): /note="Variant nucleotides given in the sequence have no preference with respect to those in the annotations for variant positions"

SEQ ID NO: 1210 - protein, 738 aa, Artificial Sequence; identical to SEQ ID NO: 918
  source: /note="Description of Artificial Sequence: Synthetic polypeptide"
  VARIANT (169)..(169): /replace="Lys"
  VARIANT (315)..(315): /replace="Ser"
  VARIANT (534)..(534): /replace="Glu"
  VARIANT (542)..(542): /replace="Val"
  SITE (1)..(738): /note="Variant residues given in the sequence have no preference with respect to those in the annotations for variant positions"

SEQ ID NO: 1211 - DNA, 2214 bp, Artificial Sequence; identical to SEQ ID NO: 919
  source: /note="Description of Artificial Sequence: Synthetic polynucleotide"
  Variation (505)..(507): /replace="aaa"
  Variation (943)..(945): /replace="agc"
  Variation (1600)..(1602): /replace="gag"
  Variation (1624)..(1626): /replace="gtc"
  misc_feature (1)..(2214): /note="Variant nucleotides given in the sequence have no preference with respect to those in the annotations for variant positions"

SEQ ID NO: 1212 - protein, 738 aa, Artificial Sequence; identical to SEQ ID NO: 920
  source: /note="Description of Artificial Sequence: Synthetic polypeptide"
  VARIANT (471)..(471): /replace="Asn"
  SITE (1)..(738): /note="Variant residues given in the sequence have no preference with respect to those in the annotations for variant positions"

SEQ ID NO: 1213 - DNA, 2214 bp, Artificial Sequence; identical to SEQ ID NO: 921
  source: /note="Description of Artificial Sequence: Synthetic polynucleotide"
  Variation (1411)..(1413): /replace="aat"
  misc_feature (1)..(2214): /note="Variant nucleotides given in the sequence have no preference with respect to those in the annotations for variant positions"

SEQ ID NO: 1214 - protein, 737 aa, Artificial Sequence; identical to SEQ ID NO: 922
  source: /note="Description of Artificial Sequence: Synthetic polypeptide"
  VARIANT (148)..(148): /replace="Gln"
  VARIANT (169)..(169): /replace="Arg"
  VARIANT (314)..(314): /replace="Asn"
  VARIANT (466)..(466): /replace="His"
  VARIANT (563)..(563): /replace="Ser"
  VARIANT (580)..(580): /replace="Ile"
  VARIANT (588)..(588): /replace="Ser"
  SITE (1)..(737): /note="Variant residues given in the sequence have no preference with respect to those in the annotations for variant positions"

SEQ ID NO: 1215 - DNA, 2211 bp, Artificial Sequence; identical to SEQ ID NO: 923
  source: /note="Description of Artificial Sequence: Synthetic polynucleotide"
  Variation (442)..(444): /replace="cag"
  Variation (505)..(507): /replace="aga"
  Variation (940)..(942): /replace="aac"
  Variation (1396)..(1398): /replace="cac"
  Variation (1687)..(1689): /replace="agt"
  Variation (1738)..(1740): /replace="ata"
  Variation (1762)..(1764): /replace="tct"
  misc_feature (1)..(2211): /note="Variant nucleotides given in the sequence have no preference with respect to those in the annotations for variant positions"

SEQ ID NO: 1216 - protein, 735 aa, Artificial Sequence; identical to SEQ ID NO: 924
  source: /note="Description of Artificial Sequence: Synthetic polypeptide"
  VARIANT (162)..(162): /replace="Thr"
  VARIANT (168)..(168): /replace="Arg"
  VARIANT (224)..(224): /replace="Ser"
  VARIANT (310)..(310): /replace="Lys"
  VARIANT (410)..(410): /replace="Gln"
  VARIANT (446)..(446): /replace="Asn"
  VARIANT (461)..(461): /replace="Leu"
  VARIANT (471)..(471): /replace="Ser"
  VARIANT (708)..(708): /replace="Thr"
  SITE (1)..(735): /note="Variant residues given in the sequence have no preference with respect to those in the annotations for variant positions"

SEQ ID NO: 1217 - DNA, 2205 bp, Artificial Sequence
  source: /note="Description of Artificial Sequence: Synthetic polynucleotide"
  Variation (484)..(486): /replace="aca"
  Variation (502)..(504): /replace="aga"
  Variation (670)..(672): /replace="tcc"
  Variation (928)..(930): /replace="aaa"
  Variation (1228)..(1230): /replace="cag"
  Variation (1336)..(1338): /replace="aac"
  Variation (1381)..(1383): /replace="ctg"
  Variation (1411)..(1413): /replace="tct"
  Variation (2122)..(2124): /replace="acc"
  misc_feature (1)..(2205): /note="Variant nucleotides given in the sequence have no preference with respect to those in the annotations for variant positions"
atggctgccgatggttatcttccagattggctcgaggacaacctctctgagggcattcgcgagtggtgggacttgaaacctggagccccgaaacccaaagccaaccagcaaaagcaggacgacggccggggtctggtgcttcctggctacaagtacctcggacccttcaacggactcgacaagggggagcccgtcaacgcggcggatgcagcggccctcgagcacgacaaggcctacgaccagcagctcaaagcgggtgacaatccgtacctgcggtataaccacgccgacgccgagtttcaggagcgtctgcaagaagatacgtcttttgggggcaacctcgggcgagcagtcttccaggccaagaagagggttctcgaacctcttggtctggttgaggaaggtgctaagacggctcctggaaagaaacgtccggtagagcagtcgccacaagagccagactcctcctcgggcattggcaagtcaggccagcagcccgctaaaaagagactcaattttggtcagactggcgactcagagtcagtccccgacccacaacctctcggagaacctccagcagccccctctggtgtgggatctaatacaatggcttcaggcggtggcgcaccaatggcagacaataacgaaggcgccgacggagtgggtaatgcctcaggaaattggcattgcgattccacatggctgggcgacagagtcatcaccaccagcacccgaacatgggccttgcccacctataacaaccacctctacaagcaaatctccagtcaatcaggggccagcaacgacaaccactacttcggctacagcaccccctgggggtattttgatttcaacagattccactgccatttctcaccacgtgactggcagcgactcatcaacaacaattggggattccggcccaagagactcaacttcaagctcttcaacatccaagtcaaggaggtcacgacgaatgatggcaccacgaccatcgctaataaccttaccagcacggttcaagtcttcacggactcggagtaccagttgccgtacgtcctcggctctgcgcaccagggctgcctccctccgttcccggcggacgtgttcatgattccgcagtacggctacctaacgctcaacaatggcagccaggcagtgggacggtcatccttttactgcctggaatatttcccatcgcagatgctgagaacgggcaataactttaccttcagctacaccttcgaggacgtgcctttccacagcagctacgcgcacagccagagcctggaccggctgatgaatcctctcatcgaccagtacctgtattacctgagcagaactcagactacgtccggaactgcccaaaacagggagttgcagtttagccaggcgggtccatctagcatggctaatcaggccaaaaactggctacctggaccctgttaccggcagcagcgcgtttctaaaacagcaaatgacaacaacaacagcaactttgcctggactggtgctacaaaatatcaccttaatgggcgtgattctttagtcaaccctggccctgctatggcctcacacaaagacgacgaagacaagttctttcccatgagcggtgtcttgatttttggaaagcagggcgccggagcttcaaacgttgatttggacaatgtcatgatcacagacgaagaggaaatcaaaaccactaaccccgtggccaccgaacaatatgggactgtggcaaccaatctccagagcagcaacacagcccctgcgaccggaactgtgaattctcagggagccttacctggaatggtgtggcaagacagagacgtatacctgcagggtcctatttgggccaaaattcctcacacggatggacactttcacccgtctcctctcatgggcggctttggacttaagcacccgcctcctcagatcctcatcaaaaacacgcctgttcctgcgaatcctccgacaacgttttcgcctgcaaagtttgcttcattcatcacccagtattccacaggacaagtgagcgtggagattgaatgggagctgcagaaagaaaacagcaaacgctggaatcccgaaatacagtatacatctaactataataaatctgccaacgttgatttcactgtggacaccaatggagtttatagtgagcctcgccccattggcacccgttacctcacccgtaacctg

SEQ ID NO: 1218 - protein, 735 aa, Artificial Sequence; identical to SEQ ID NO: 926
  source: /note="Description of Artificial Sequence: Synthetic polypeptide"
  VARIANT (42)..(42): /replace="Ser"
  VARIANT (168)..(168): /replace="Lys"
  VARIANT (310)..(310): /replace="Arg"
  VARIANT (410)..(410): /replace="Gln"
  VARIANT (446)..(446): /replace="Arg"
  VARIANT (461)..(461): /replace="Leu"
  VARIANT (471)..(471): /replace="Ser"
  VARIANT (475)..(475): /replace="Arg"
  VARIANT (504)..(504): /replace="Ala"
  VARIANT (539)..(539): /replace="Asn"
  SITE (1)..(735): /note="Variant residues given in the sequence have no preference with respect to those in the annotations for variant positions"

SEQ ID NO: 1219 - DNA, 2205 bp, Artificial Sequence
  source: /note="Description of Artificial Sequence: Synthetic polynucleotide"
  Variation (124)..(126): /replace="agt"
  Variation (502)..(504): /replace="aaa"
  Variation (928)..(930): /replace="aga"
  Variation (1228)..(1230): /replace="cag"
  Variation (1336)..(1338): /replace="aga"
  Variation (1381)..(1383): /replace="ctc"
  Variation (1411)..(1413): /replace="tct"
  Variation (1423)..(1425): /replace="aga"
  Variation (1510)..(1512): /replace="gcg"
  Variation (1615)..(1617): /replace="gac"
  misc_feature (1)..(2205): /note="Variant nucleotides given in the sequence have no preference with respect to those in the annotations for variant positions"
atggctgctgacggttatcttccagattggctcgaggacaacctttctgaaggcattcgtgagtggtgggatctgaaacctggagcccctcaacccaaagcgaaccaacaacaccaggacgacggtcggggtcttgtgcttccgggttacaaatacctcggaccctttaacggactcgacaaaggagagccggtcaacgaggcggacgcggcagccctcgaacacgacaaagcttacgaccagcagctcaaggccggtgacaacccgtacctcaagtacaaccacgccgacgccgagtttcaggagcgtcttcaagaagatacgtcttttgggggcaaccttggcagagcagtcttccaggccaaaaagagggtccttgagcctcttggtctggttgaggaagcagctaaaacggctcctggaaagaagaggcctgtagaacagtctcctcaggaaccggactcatcatctggtattggcaaatcgggccaacagcctgccagaaaaagactaaatttcggtcagactggagactcagagtcagtcccagaccctcaacctctcggagaaccaccagcagccccctcaggtgtgggatctaatacaatggcttcaggcggtggcgcaccaatggcagacaataacgagggtgccgatggagtgggtaattcctcaggaaattggcattgcgattccacatggctgggcgacagagtcatcaccaccagcaccagaacctgggccctgcccacttacaacaaccatctctacaagcaaatctccagccaatcaggagcttcaaacgacaaccactactttggctacagcaccccttgggggtattttgactttaacagattccactgccacttctcaccacgtgactggcagcgactcattaacaacaactggggattccggcccaagaaactcaacttcaagctcttcaacatccaagttaaagaggtcacgcagaacgatggcacgacgactattgccaataaccttaccagcacggttcaagtgtttacggactcggagtatcagctcccgtacgtgctcgggtcggcgcaccaaggctgtctcccgccgtttccagcggacgtcttcatgatccctcagtatggatacctcaccctgaacaacggaagtcaagcggtgggacgctcatccttttactgcctggagtacttcccttcgcagatgctaaggactggaaataacttcacattcagctataccttcgaggatgtaccttttcacagcagctacgctcacagccagagtttggatcgcttgatgaatcctcttattgatcagtatctgtactacctgagcagaacgcaaacaacctctggaacaacccaacaatcacggctgcaatttagccaggctgggccttcgtctatggctcagcaggccaaaaattggctacctgggccctgctaccggcaacagagagtttcaaagactgctaacgacaacaacaacagtaactttgcttggacaggggccaccaaatatcatctcaatggccgcgactcgctggtgaatccaggaccagctatggccagtcacaaggacgatgaagaaaaatttttccctatgcacggcgttctaatatttggcaaacaagggacaggggcaagtaacgtagatttagataatgtaatgattacggatgaagaagagattcgtaccaccaatcctgtggcaacagagcagtatggaactgtggcaactaacttgcagagctcaaatacagctcccgcgactggaactgtcaatagtcagggggccttacctggcatggtgtggcaagatcgtgacgtgtaccttcaaggacctatctgggcaaagattcctcacacggatggacactttcatccttctcctctgatgggaggctttggactgaaacatccgcctcctcaaatcttgatcaaaaatactccggtaccggcaaatcctccgacgactttcagcccggccaagtttgcttcatttatcactcagtactccactggacaggtcagcgtggaaattgagtgggagctacagaaagaaaacagcaaacgttggaatccagagattcagtacacttccaactacaacaagtctgttaatgtggactttactgtagacactaatggtgtttatagtgaacctcgccctattggaacccggtatctcacacgaaacttg

SEQ ID NO: 1220 - protein, 736 aa, Artificial Sequence; identical to SEQ ID NO: 928
  source: /note="Description of Artificial Sequence: Synthetic polypeptide"

SEQ ID NO: 1221 - protein, 736 aa, Artificial Sequence; identical to SEQ ID NO: 929
  source: /note="Description of Artificial Sequence: Synthetic polypeptide"

SEQ ID NO: 1222 - protein, 736 aa, Artificial Sequence; identical to SEQ ID NO: 930
  source: /note="Description of Artificial Sequence: Synthetic polypeptide"

SEQ ID NO: 1223 - protein, 736 aa, Artificial Sequence; identical to SEQ ID NO: 931
  source: /note="Description of Artificial Sequence: Synthetic polypeptide"

SEQ ID NO: 1224 - protein, 736 aa, Artificial Sequence; identical to SEQ ID NO: 932
  source: /note="Description of Artificial Sequence: Synthetic polypeptide"

SEQ ID NO: 1225 - protein, 736 aa, Artificial Sequence; identical to SEQ ID NO: 933
  source: /note="Description of Artificial Sequence: Synthetic polypeptide"

SEQ ID NO: 1226 - protein, 736 aa, Artificial Sequence; identical to SEQ ID NO: 934
  source: /note="Description of Artificial Sequence: Synthetic polypeptide"

SEQ ID NO: 1227 - protein, 736 aa, Artificial Sequence; identical to SEQ ID NO: 935
  source: /note="Description of Artificial Sequence: Synthetic polypeptide"

SEQ ID NO: 1228 - DNA, 2211 bp, Artificial Sequence; identical to SEQ ID NO: 936
  source: /note="Description of Artificial Sequence: Synthetic polynucleotide"

SEQ ID NO: 1229 - protein, 738 aa, Artificial Sequence; identical to SEQ ID NO: 16
  source: /note="Description of Artificial Sequence: Synthetic polypeptide"

SEQ ID NO: 1230 - protein, 738 aa, Artificial Sequence; identical to SEQ ID NO: 16
  source: /note="Description of Artificial Sequence: Synthetic polypeptide"

SEQ ID NO: 1231 - protein, 738 aa, Artificial Sequence
  source: /note="Description of Artificial Sequence: Synthetic polypeptide"
  VARIANT (157)..(157): /replace="Thr"
  VARIANT (169)..(169): /replace="Arg"
  VARIANT (457)..(457): /replace="Gly"
  VARIANT (463)..(463): /replace="Ala"
  VARIANT (508)..(508): /replace="Ala"
  VARIANT (510)..(510): /replace="Phe"
  VARIANT (511)..(511): /replace="Lys"
  VARIANT (558)..(558): /replace="Asn"
  VARIANT (585)..(585): /replace="His"
  VARIANT (587)..(587): /replace="Ala"
  SITE (1)..(738): /note="Variant residues given in the sequence have no preference with respect to those in the annotations for variant positions"
MAADGYLPDWLEDNLSEGIREWWDLKPGAPKPKANQQKQDDGRGLVLPGYKYLGPFNGLDKGEPVNAADAAALEHDKAYDQQLKAGDNPYLRYNHADAEFQERLQEDTSFGGNLGRAVFQAKKRVLEPLGLVEEGAKTAPGKKRPVEQSPQEPDSSSLGIGKTGQQPAKKRLNFGQTGDSESVPDPQPLGEPPAAPSGVGSNTMASGGGAPMADNNEGADGVGNSSGNWHCDSTWLGDRVITTSTRTWALPTYNNHLYKQISNGTSGGSTNDNTYFGYSTPWGYFDFNRFHCHFSPRDWQRLINNNWGFRPKRLNFKLFNIQVKEVTTNEGTKTIANNLTSTVQVFTDSEYQLPYVLGSAHQGCLPPFPADVFMIPQYGYLTLNNGSQAVGRSSFYCLEYFPSQMLRTGNNFQFSYTFEDVPFHSSYAHSQSLDRLMNPLIDQYLYYLSRTQTTGTAGTQTLQFSQAGPSSMANQARNWVPGPCYRQQRVSTTTNQNNNSNFAWTGATKYHLNGRDSLMNPGVAMASHKDDEDRFFPSSGVLIFGKQGAGNDNVDYSQVMITNEEEIKTTNPVATEEYGAVATNNQSLANTQAQTGLVHNQGVLPGMVWQNRDVYLQGPIWAKIPHTDGNFHPSPLMGGFGLKHPPPQILIKNTPVPADPPTTFNQAKLNSFITQYSTGQVSVEIEWELQKENSKRWNPEIQYTSNYYKSTNVDFAVNTEGVYSEPRPIGTRYLTRNL

SEQ ID NO: 1232 - DNA, 2211 bp, Artificial Sequence
  source: /note="Description of Artificial Sequence: Synthetic polynucleotide"
  Variation (469)..(471): /replace="acg"
  Variation (502)..(504): /replace="aga"
  Variation (1366)..(1368): /replace="gga"
  Variation (1384)..(1386): /replace="gca"
  Variation (1519)..(1521): /replace="gcc"
  Variation (1525)..(1527): /replace="ttt"
  Variation (1528)..(1530): /replace="aaa"
  Variation (1669)..(1671): /replace="aac"
  Variation (1750)..(1752): /replace="cac"
  Variation (1756)..(1758): /replace="gcc"
  misc_feature (1)..(2211): /note="Variant nucleotides given in the sequence have no preference with respect to those in the annotations for variant positions"
atggctgccgatggttatcttccagattggctcgaggacaacctctctgagggcattcgcgagtggtgggacttgaaacctggagccccgaaacccaaagccaaccagcaaaagcaggacgacggccggggtctggtgcttcctggctacaagtacctcggacccttcaacggactcgacaagggggagcccgtcaacgcggcggacgcagcggccctcgagcacgacaaagcctacgaccagcagctcaaagcgggtgacaatccgtacctgcggtataatcacgccgacgccgagtttcaggagcgtctgcaagaagatacgtcttttgggggcaacctcgggcgagcagtcttccaggccaagaagcgggttctcgaacctctcggtctggttgaggaaggcgctaagacggctcctggaaagaagaggccggtagagcagtcgccacaagagccagactcctcctcgggcatcggcaagacaggccagcagcccgctaaaaagagactcaattttggtcagactggcgactcagagtcagtccccgacccacaacctctcggagaacctccagcagccccctcaggtgtgggatctaatacaatggcttcaggcggtggcgctccaatggcagacaataacgaaggcgccgacggagtgggtaattcctcgggaaattggcattgcgattccacatggctgggggacagagtcatcaccaccagcacccgaacctgggccctgcccacctacaacaaccacctctacaagcaaatctccaacggcacctcgggaggaagcaccaacgacaacacctattttggctacagcaccccctgggggtattttgacttcaacagattccactgtcacttttcaccacgtgactggcaacgactcatcaacaacaattggggattccggcccaaaagactcaacttcaagctgttcaacatccaggtcaaggaagtcacgacgaacgaaggcaccaagaccatcgccaataatctcaccagcaccgtgcaggtctttacggactcggagtaccagttaccgtacgtgctaggatccgctcaccagggatgtctgcctccgttcccggcggacgtcttcatgattcctcagtacggctatttaactttaaacaatggaagccaagccgtgggacgttcctccttctactgtctggagtatttcccatcgcagatgctgagaaccggcaacaactttcagttcagctacaccttcgaggacgtgcctttccacagcagctacgcgcacagccagagcctggacaggctgatgaatcccctcatcgaccagtacctgtactacctgtccagaacgcaaacgactggaactgcagggacgcagactctgcaattcagccaagcgggtcctagctcaatggccaaccaggctagaaattgggtgcccggaccttgctaccggcagcagcgcgtctccacgacaaccaaccagaacaacaacagcaactttgcctggacgggagctaccaagtatcacctgaacggccgagactctctaatgaatccgggcgtggcaatggcttcccacaaggatgacgaggaccgcttcttcccttcgagcggggtcctgatttttggcaagcaaggagccgggaacgataatgtggattacagccaagtgatgattacaaatgaggaagaaatcaagactaccaaccccgtggccacagaagaatatggagcagtggccaccaacaaccagtccgccaatacgcaggcgcagaccggactcgtgcacaaccagggggtgcttcccggcatggtgtggcagaatagagacgtgtacctgcagggtcccatctgggccaaaattcctcacacggacggcaactttcacccgtctcccctgatgggcggctttggactgaagcacccgcctcctcaaattctcatcaagaacacaccggttccagcggacccgccgactaccttcaaccaggccaagctgaactctttcatcacgcagtacagcaccggacaggtcagcgtggaaatcgagtgggagctgcagaaagaaaacagcaaacgctggaatccagagattcaatacacttccaactactacaaatctacaaatgtggactttgctgtcaacacggagggggtttatagcgagcctcgccccattggcacccgttacctcacccgcaacctgtaa

SEQ ID NO: 1233 - protein, 733 aa, Artificial Sequence; identical to SEQ ID NO: 432
  source: /note="Description of Artificial Sequence: Synthetic polypeptide"

SEQ ID NO: 1234 - DNA, 4472 bp, Artificial Sequence
  source: /note="Description of Artificial Sequence: Synthetic polynucleotide"
ctccatcactaggggtaaccgcgaagcgcctcccacgctgccgcgtcagcgctgacgtaaattacgtcataggggagtggtcctgtattagctgtcacgtgagtgcttttgcgacattttgcgacaccacgtggccattcatggtatatatggccgagtgagcgagcaggatctccattttgaccgcgaaatttgaacgagcagcagccatgccgggcttctacgagatcgtgcttaaggtgccgagcgacctggacgagcacctgccgggcatttctgactcgtttgtgaactgggtggcagagaaggaatgggagctgcccccggattctgacatggatcggaatctgattgagcaggcacccctgaccgtggccgagaagctacagcgcgacttcctggtccaatggcgccgcgtgagtaaggccccggaggccctcttctttgttcagttcgagaagggcgagtcctacttccacctccatattctggtagagaccacgggggtcaaatccatggtgctgggccgcttcctgagtcagattcgggacaagctggtgcagaccatctaccgcgggatcgagccgaccctgcccaactggttcgcggtgacaaagacgcgtaatggcgccggaggggggaacaaggtggtggacgagtgctacatccccaactacctgctgcccaagactcagcccgagctgcagtgggcgtggactaacatggaggagtatataagcgcgtgcttgaacctggccgagcgcaaacggctcgtggcgcagcacctgacccacgtcagccagacccaggagcagaacaaggagaatctgaacccgaattctgacgcgcctgtcatccggtcaaaaacctccgcgcgctacatggagctggtcgggtggctggtggaccggggcatcacctccgagaagcagtggatccaggaggaccaggcctcgtacatctccttcaacgccgcctccaactcgcggtctcagatcaaggccgcgctggacaatgccggcaagatcatggcgctgaccaaatccgcgcccgactacctggtaggccccgctctgcccgcggacattaaatccaaccgcatctaccgcatcctggagctgaatggctacgaccctgcctacgccggttccgtctttctcggctgggcccagaaaaagtttggcaaaaggaacaccatctggctgtttgggccggccaccacgggcaagaccaacatcgcggaagccatcgcccacgccgtgcccttctacggctgcgtcaactggaccaatgagaactttcccttcaacgattgcgtcgacaagatggtgatctggtgggaggagggcaagatgacggccaaggtcgtggagtccgccaaggccattctcggcggcagcaaggtgcgcgtggaccaaaagtgcaagtcgtccgcccagatcgatcccacccccgtgatcgtcacctccaacaccaacatgtgcgccgtgattgacgggaacagcaccaccttcgagcaccagcagccgttgcaggaccggatgttcaaatttgaacttacccgccgtctggagcacgactttggcaaggtgacaaagcaggaagtcaaagagttcttccgctgggcgcaggatcacgtgaccgaggtggcgcatgagttctacgtcagaaagggtggagctaacaaaagacccgcccccgatgacgcggatataagcgagcccaagcgggcctgcccctcagtcgcggatccatcgacgtcagacgcggaaggagctccggtggactttgccgacaggtaccaaaacaaatgttctcgtcacgcgggcatgcttcagatgctgtttccctgcaaaacatgcgagagaatgaatcagaatttcaacatttgcttcacgcacgggaccagagactgttcagaatgtttccctggcgtgtcagaatctcaaccggtcgtcagaaaaaagacgtatcggaaactctgtgcgattcatcatctgctggggcgggcacccgagattgcttgctcggcctgcgacctggtcaacgtggacctggatgactgtgtttctgagcaataaatgacttaaaccaggtatggctgccgatggttatcttccagattggctcgaggacaacctctctgagggcattcgcgagtggtgggacctgaaacctggagccccgaaacccaaagccaaccagcaaaagcaggacaacggccggggtctggtgcttcctggctacaagtacctcggacccttcaacggactcgacaagggggagcccgtcaacgcggcggacgcagcggccctcgagcacgacaaggcctacgaccagcagctccaagcgggtgacaatccgtacctgcggtataatcacgccgacgccgagtttcaggagcgtctgcaagaagatacgtcttttgggggcaacctcgggcgcgcagtcttccaggccaaaaagcgggttctcgaacctctgggcctggttgaatcgccggttaagacggctcctggaaagaagagaccggtagagccatcaccccagcgctctccagactcctctacgggcatcggcaagaaaggccagcagcccgcaaaaaagagactcaattttgggcagactggcgactcagagtcagtccccgaccctcaaccaatcggagaaccaccagcaggcccctctggtctgggatctggtacaatggctgcaggcggtggcgctccaatggcagacaataacgaaggcgccgacggagtgggtagttcctcaggaaattggcattgcgattccacatggctgggcgacagagtcatcaccaccagcacccgcacctgggccctgcccacctacaacaaccacctctacaagcaaatctccaacgggacctcgggaggaagcaccaacgacaacacctacttcggctacagcaccccctgggggtattttgacttcaacagattccactgccacttttcaccacgtgactggcagcgactcatcaacaacaactggggattccggcccaagaggctcaacttcaagctcttcaacatccaagtcaaggaggtcacgcagaatgaaggcaccaagaccatcgccaataaccttaccagcacgattcaggtctttacggactcggaataccagctcccgtacgtgctcggctcggcgcaccagggctgcctgcctccgttcccggcggacgtcttcatgattcctcagtacgggtacctgactctgaacaatggcagtcaggctgtgggccggtcgtccttctactgcctggagtactttccttctcaaatgctgagaacgggcaacaactttgaattcagctacaacttcgaggacgtgcccttccacagcagctacgcgcacagccagagcctggaccggctgatgaaccctctcatcgaccagtacttgtactacctgtcccggactcaaagcacgggcggtactgcaggaactcagcagttgctattttctcaggccgggcctaacaacatgtcggctcaggccaagaactggctacccggtccctgctaccggcagcaacgcgtctccacgacactgtcgcagaacaacaacagcaactttgcctggacgggtgccaccaagtatcatctgaatggcagagactctctggtgaatcctggcgttgccatggctacccacaaggacgacgaagagcgattttttccatccagcggagtcttaatgtttgggaaacagggagctggaaaagacaacgtggactatagcagcgtgatgctaaccagcgaggaagaaataaagaccaccaacccagtggccacagaacagtacggcgtggtggccgataacctgcaacagcaaaacgccgctcctattgtaggggccgtcaatagtcaaggagccttacctggcatggtgtggcagaaccgggacgtgtacctgcagggtcccatctgggccaagattcctcatacggacggcaactttcatccctcgccgctgatgggaggctttggactgaagcatccgcctcctcagatcctgattaaaaacacacctgttcccgcggatcctccgaccaccttcactaaggccaagctggcttctttcatcacgcagtacagtaccggccaggtcagcgtggagatcgagtgggagctgcagaaggagaacagcaaacgctggaacccagagattcagtacacttccaactactacaaatctacaaatgtggactttgctgtcaatactgagggtacttattccgagcctcgccccattggcacccgttacctcacccgtaatctgtaattacatgttaatcaataaaccggttaattcgtttcagttgaactttggtctcctgtccttcttatcttatcggttaccatagaaactggttacttattaactgcttggtgcgcttcgcgataaaagacttacgtcatcgggttacccctagtgatgga

SEQ ID NO: 1235 - DNA, 2208 bp, Artificial Sequence
  source: /note="Description of Artificial Sequence: Synthetic polynucleotide"
atggctgccgatggttatcttccagattggctcgaggacactctctctgaaggaataagacagtggtggaagctcaaacctggcccaccaccaccaaagcccgcagagcggcataaggacgacagcaggggtcttgtgcttcctgggtacaagtacctcggacccttcaacggactcgacaagggagagccggtcaacgaggcagacgccgcggccctcgagcacgacaaagcctacgaccggcagctcgacagcggagacaacccgtacctcaagtacaaccacgccgacgcggagtttcaggagcgccttaaagaagatacgtcttttgggggcaacctcggacgagcagtcttccaggcgaaaaagagggttcttgaacctctgggcctggttgaggaacctgttaagaaggctccgggaaaaaagaggccggtagagcactctcctgtggagccagactcctcctcgggaaccggaaaggcgggccagcagcctgcaagaaaaagattgaattttggtcagactggagacgcagactcagtacctgacccccagcctctcggacagccaccagcagccccctctggtctgggaactaataccatggctacaggcagtggcgcaccaatggcagacaataacgagggtgccgacggagtgggtaattcctcgggaaattggcattgcgattccacatggatgggcgacagagtcatcaccaccagcacccgaacctgggccctgcccacctacaacaaccacctctacaaacaaatttccagccaatcaggagcctcgaacgacaatcactactttggctacagcaccccttgggggtattttgacttcaacagattccactgccacttttcaccacgtgactggcaaagactcatcaacaacaactggggattccgacccaagagactcaacttcaagctctttaacattcaagtcaaagaggtcacgcagaatgacggtacgacgacgattgccaataaccttaccagcacggttcaggtgtttactgactcggagtaccagctcccgtacgtcctcggctcggcgcatcaaggatgcctcccgccgttcccagcagacgtcttcatggtgccacagtatggatacctcaccctgaacaacgggagtcaggcagtaggacgctcttcattttactgcctggagtactttccttctcagatgctgcgtaccggaaacaactttaccttcagctacacttttgaggacgttcctttccacagcagctacgctcacagccagagtctggaccgtctcatgaatcctctcatcgaccagtacctgtattacttgagcagaacaaacactccaagtggaaccaccacgcagtcaaggcttcagttttctcaggccggagcgagtgacattcgggaccagtctaggaactggcttcctggaccctgttaccgccagcagcgagtatcaaagacatctgcggataacaacaacagtgaatactcgtggactggagctaccaagtaccacctcaatggcagagactctctggtgaatccgggcccggctatggcaagccacaaggacgatgaagaaaagttttttcctcagagcggggttctcatctttgggaagcaaggctcagagaaaacaaatgtggacattgaaaaggtcatgattacagacgaagaggaaatcaggacaaccaatcccgtggctacggagcagtatggttctgtatctaccaacctccagagaggcaacagacaagcagctaccgcagatgtcaacacacaaggcgttcttccaggcatggtctggcaggacagagatgtgtaccttcaggggcccatctgggcaaagattccacacacggacggacattttcacccctctcccctcatgggtggattcggacttaaacaccctcctccacagattctcatcaagaacaccccggtgcctgcgaatccttcgaccaccttcagtgcggcaaagtttgcttccttcatcacacagtactccacgggacaggtcagcgtggagatcgagtgggagctgcagaaggaaaacagcaaacgctggaatcccgaaattcagtacacttccaactacaacaagtctgttaatgtggactttactgtggacactaatggcgtgtattcagagcctcgccccattggcaccagatacctgactcgtaatctgtaa

SEQ ID NO: 1236 - protein, 735 aa, Artificial Sequence
  source: /note="Description of Artificial Sequence: Synthetic polypeptide"
MAADGYLPDWLEDTLSEGIRQWWKLKPGPPPPKPAERHKDDSRGLVLPGYKYLGPFNGLDKGEPVNEADAAALEHDKAYDRQLDSGDNPYLKYNHADAEFQERLKEDTSFGGNLGRAVFQAKKRVLEPLGLVEEPVKKAPGKKRPVEHSPVEPDSSSGTGKAGQQPARKRLNFGQTGDADSVPDPQPLGQPPAAPSGLGTNTMATGSGAPMADNNEGADGVGNSSGNWHCDSTWMGDRVITTSTRTWALPTYNNHLYKQISSQSGASNDNHYFGYSTPWGYFDFNRFHCHFSPRDWQRLINNNWGFRPKRLNFKLFNIQVKEVTQNDGTTTIANNLTSTVQVFTDSEYQLPYVLGSAHQGCLPPFPADVFMVPQYGYLTLNNGSQAVGRSSFYCLEYFPSQMLRTGNNFTFSYTFEDVPFHSSYAHSQSLDRLMNPLIDQYLYYLSRTNTPSGTTTQSRLQFSQAGASDIRDQSRNWLPGPCYRQQRVSKTSADNNNSEYSWTGATKYHLNGRDSLVNPGPAMASHKDDEEKFFPQSGVLIFGKQGSEKTNVDIEKVMITDEEEIRTTNPVATEQYGSVSTNLQRGNRQAATADVNTQGVLPGMVWQDRDVYLQGPIWAKIPHTDGHFHPSPLMGGFGLKHPPPQILIKNTPVPANPSTTFSAAKFASFITQYSTGQVSVEIEWELQKENSKRWNPEIQYTSNYNKSVNVDFTVDTNGVYSEPRPIGTRYLTRNL

SEQ ID NO: 1237 - DNA, 8376 bp, Artificial Sequence
  source: /note="Description of Artificial Sequence: Synthetic polynucleotide"
aattcccatcatcaataatataccttattttggattgaagccaatatgataatgagggggtggagtttgtgacgtggcgcggggcgtgggaacggggcgggtgacgtagtagtctctagagtcctgtattagaggtcacgtgagtgttttgcgacattttgcgacaccatgtggtcacgctgggtatttaagcccgagtgagcacgcagggtctccattttgaagcgggaggtttgaacgcgcagccaccacgccggggttttacgagattgtgattaaggtccccagcgaccttgacgggcatctgcccggcatttctgacagctttgtgaactgggtggccgagaaggaatgggagttgccgccagattctgacatggatctgaatctgattgagcaggcacccctgaccgtggccgagaagctgcagcgcgactttctgacggaatggcgccgtgtgagtaaggccccggaggcccttttctttgtgcaatttgagaagggagagagctacttccacatgcacgtgctcgtggaaaccaccggggtgaaatccatggttttgggacgtttcctgagtcagattcgcgaaaaactgattcagagaatttaccgcgggatcgagccgactttgccaaactggttcgcggtcacaaagaccagaaatggcgccggaggcgggaacaaggtggtggatgagtgctacatccccaattacttgctccccaaaacccagcctgagctccagtgggcgtggactaatatggaacagtatttaagcgcctgtttgaatctcacggagcgtaaacggttggtggcgcagcatctgacgcacgtgtcgcagacgcaggagcagaacaaagagaatcagaatcccaattctgatgcgccggtgatcagatcaaaaacttcagccaggtacatggagctggtcgggtggctcgtggacaaggggattacctcggagaagcagtggatccaggaggaccaggcctcatacatctccttcaatgcggcctccaactcgcggtcccaaatcaaggctgccttggacaatgcgggaaagattatgagcctgactaaaaccgcccccgactacctggtgggccagcagcccgtggaggacatttccagcaatcggatttataaaattttggaactaaacgggtacgatccccaatatgcggcttccgtctttctgggatgggccacgaaaaagttcggcaagaggaacaccatctggctgtttgggcctgcaactaccgggaagaccaacatcgcggaggccatagcccacactgtgcccttctacgggtgcgtaaactggaccaatgagaactttcccttcaacgactgtgtcgacaagatggtgatctggtgggaggaggggaagatgaccgccaaggtcgtggagtcggccaaagccattctcggaggaagcaaggtgcgcgtggaccagaaatgcaagtcctcggcccagatagacccgactcccgtgatcgtcacctccaacaccaacatgtgcgccgtgattgacgggaactcaacgaccttcgaacaccagcagccgttgcaagaccggatgttcaaatttgaactcacccgccgtctggatcatgactttgggaaggtcaccaagcaggaagtcaaagactttttccggtgggcaaaggatcacgtggttgaggtggagcatgaattctacgtcaaaaagggtggagccaagaaaagacccgcccccagtgacgcagatataagtgagcccaaacgggtgcgcgagtcagttgcgcagccatcgacgtcagacgcggaagcttcgatcaactacgcagacaggtaccaaaacaaatgttctcgtcacgtgggcatgaatctgatgctgtttccctgcagacaatgcgagagaatgaatcagaattcaaatatctgcttcactcacggacagaaagactgtttagagtgctttcccgtgtcagaatctcaacccgtttctgtcgtcaaaaaggcgtatcagaaactgtgctacattcatcatatcatgggaaaggtgccagacgcttgcactgcctgcgatctggtcaatgtggatttggatgactgcatctttgaacaataaatgatttaaatcaggtatggctgccgatggttatcttccagattggctcgaggacactctctctgaaggaataagacagtggtggaagctcaaacctggcccaccaccaccaaagcccgcagagcggcataaggacgacagcaggggtcttgtgcttcctgggtacaagtacctcggacccttcaacggactcgacaagggagagccggtcaacgaggcagacgccgcggccctcgagcacgacaaagcctacgaccggcagctcgacagcggagacaacccgtacctcaagtacaaccacgccgacgcggagtttcaggagcgccttaaagaagatacgtcttttgggggcaacctcggacgagcagtcttccaggcgaaaaagagggttcttgaacctctgggcctggttgaggaacctgttaagacggctccgggaaaaaagaggccggtagagcactctcctgtggagccagactcctcctcgggaaccggaaaggcgggccagcagcctgcaagaaaaagattgaattttggtcagactggagacgcagactcagtacctgacccccagcctctcggacagccaccagcagccccctctggtctgggaactaatacgatggctacaggcagtggcgcaccaatggcagacaataacgagggcgccgacggagtgggtaattcctcgggaaattggcattgcgattccacatggatgggcgacagagtcatcaccaccagcacccgaacctgggccctgcccacctacaacaaccacctctacaaacaaatttccagccaatcaggagcctcgaacgacaatcactactttggctacagcaccccttgggggtattttgacttcaacagattccactgccacttttcaccacgtgactggcaaagactcatcaacaacaactggggattccgacccaagagactcaacttcaagctctttaacattcaagtcaaagaggtcacgcagaatgacggtacgacgacgattgccaataaccttaccagcacggttcaggtgtttactgactcggagtaccagctcccgtacgtcctcggctcggcgcatcaaggatgcctcccgccgttcccagcagacgtcttcatggtgccacagtatggatacctcaccctgaacaacgggagtcaggcagtaggacgctcttcattttactgcctggagtactttccttctcagatgctgcgtaccggaaacaactttaccttcagctacacttttgaggacgttcctttccacagcagctacgctcacagccagagtctggaccgtctcatgaatcctctcatcgaccagtacctgtattacttgagcagaacaaacactccaagtggaaccaccacgcagtcaaggcttcagttttctcaggccggagcgagtgacattcgggaccagtctaggaactggcttcctggaccctgttaccgccagcagcgagtatcaaagacatctgcggataacaacaacagtgaatactcgtggactggagctaccaagtaccacctcaatggcagagactctctggtgaatccgggcccggccatggcaagccacaaggacgatgaagaaaagttttttcctcagagcggggttctcatctttgggaagcaaggctcagagaaaacaaatgtggacattgaaaaggtcatgattacagacgaagaggaaatcaggacaaccaatcccgtggctacggagcagtatggttctgtatctaccaacctccagagaggcaacagacaagcagctaccgcagatgtcaacacacaaggcgttcttccaggcatggtctggcaggacagagatgtgtaccttcaggggcccatctgggcaaagattccacacacggacggacattttcacccctctcccctcatgggtggattcggacttaaacaccctcctccacagattctcatcaagaacaccccggtacctgcgaatccttcgaccaccttcagtgcggcaaagtttgcttccttcatcacacagtactccacgggacaggtcagcgtggagatcgagtgggagctgcagaaggaaaacagcaaacgctggaatcccgaaattcagtacacttccaactacaacaagtctgttaatgtggactttactgtggacactaatggcgtgtattcagagcctcgccccattggcaccagatacctgactcgtaatctgtaattgcttgttaatcaataaaccgtttaattcgtttcagttgaactttggtctctgcgtatttctttcttatctagtttccatgctctagagtcctgtattagaggtcacgtgagtgttttgcgacattttgcgacaccatgtggtcacgctgggtatttaagcccgagtgagcacgcagggtctccattttgaagcgggaggtttgaacgcgcagccaccacggcggggttttacgagattgtgattaaggtccccagcgaccttgacgggcatctgcccggcatttctgacagctttgtgaactgggtggccgagaaggaatgggagttgccgccagattctgacatggatctgaatctgattgagcaggcacccctgaccgtggccgagaagctgcatcgctggcgtaatagcgaagaggcccgcaccgatcgcccttcccaacagttgcgcagcctgaatggcgaatggaattccagacgattgagcgtcaaaatgtaggtatttccatgagcgtttttcctgttgcaatggctggcggtaatattgttctggatattaccagcaaggccgatagtttgagttcttctactcaggcaagtgatgttattactaatcaaagaagtattgcgacaacggttaatttgcgtgatggacagactcttttactcggtggcctcactgattataaaaacacttctcaggattctggcgtaccgttcctgtctaaaatccctttaatcggcctcctgtttagctcccgctctgattctaacgaggaaagcacgttatacgtgctcgtcaaagcaaccatagtacgcgccctgtagcggcgcattaagcgcggcgggtgtggtggttacgcgcagcgtgaccgctacacttgccagcgccctagcgcccgctcctttcgctttcttcccttcctttctcgccacgttcgccggctttccccgtcaagctctaaatcgggggctccctttagggttccgatttagtgctttacggcacctcgaccccaaaaaacttgattagggtgatggttcacgtagtgggccatcgccctgatagacggtttttcgccctttgacgttggagtccacgttctttaatagtggactcttgttccaaactggaacaacactcaaccctatctcggtctattcttttgatttataagggattttgccgatttcggcctattggttaaaaaatgagctgatttaacaaaaatttaacgcgaattttaacaaaatattaacgtttacaatttaaatatttgcttatacaatcttcctgtttttggggcttttctgattatcaaccggggtacatatgattgacatgctagttttacgattaccgttcatcgattctcttgtttgctccagactctcaggcaatgacctgatagcctttgtagagacctctcaaaaatagctaccctctccggcatgaatttatcagctagaacggttgaatatcatattgatggtgatttgactgtctccggcctttctcacccgtttgaatctttacctacacattactcaggcattgcatttaaaatatatgagggttctaaaaatttttatccttgcgttgaaataaaggcttctcccgcaaaagtattacagggtcataatgtttttggtacaaccgatttagctttatgctctgaggctttattgcttaattttgctaattctttgccttgcctgtatgatttattggatgttggaattcctgatgcggtattttctccttacgcatctgtgcggtatttcacaccgcatatggtgcactctcagtacaatctgctctgatgccgcatagttaagccagccccgacacccgccaacacccgctgacgcgccctgacgggcttgtctgctcccggcatccgcttacagacaagctgtgaccgtctccgggagctgcatgtgtcagaggttttcaccgtcatcaccgaaacgcgcgagacgaaagggcctcgtgatacgcctatttttataggttaatgtcatgataataatggtttcttagacgtcaggtggcacttttcggggaaatgtgcgcggaacccctatttgtttatttttctaaatacattcaaatatgtatccgctcatgagacaataaccctgataaatgcttcaataatattgaaaaaggaagagtatgagtattcaacatttccgtgtcgcccttattcccttttttgcggcattttgccttcctgtttttgctcacccagaaacgctggtgaaagtaaaagatgctgaagatcagttgggtgcacgagtgggttacatcgaactggatctcaacagcggtaagatccttgagagttttcgccccgaagaacgttttccaatgatgagcacttttaaagttctgctatgtggcgcggtattatcccgtattgacgccgggcaagagcaactcggtcgccgcatacactattctcagaatgacttggttgagtactcaccagtcacagaaaagcatcttacggatggcatgacagtaagagaattatgcagtgctgccataaccatgagtgataacactgcggccaacttacttctgacaacgatcggaggaccgaaggagctaaccgcttttttgcacaacatgggggatcatgtaactcgccttgatcgttgggaaccggagctgaatgaagccataccaaacgacgagcgtgacaccacgatgcctgtagcaatggcaacaacgttgcgcaaactattaactggcgaactacttactctagcttcccggcaacaattaatagactggatggaggcggataaagttgcaggaccacttctgcgctcggcccttccggctggctggtttattgctgataaatctggagccggtgagcgtgggtctcgcggtatcattgcagcactggggccagatggtaagccctcccgtatcgtagttatctacacgacggggagtcaggcaactatggatgaacgaaatagacagatcgctgagataggtgcctcactgattaagcattggtaactgtcagaccaagtttactcatatatactttagattgatttaaaacttcatttttaatttaaaaggatctaggtgaagatcctttttgataatctcatgaccaaaatcccttaacgtgagttttcgttccactgagcgtcagaccccgtagaaaagatcaaaggatcttcttgagatcctttttttctgcgcgtaatctgctgcttgcaaacaaaaaaaccaccgctaccagcggtggtttgtttgccggatcaagagctaccaactctttttccgaaggtaactggcttcagcagagcgcagataccaaatactgtccttctagtgtagccgtagttaggccaccacttcaagaactctgtagcaccgcctacatacctcgctctgctaatcctgttaccagtggctgctgccagtggcgataagtcgtgtcttaccgggttggactcaagacgatagttaccggataaggcgcagcggtcgggctgaacggggggttcgtgcacacagcccagcttggagcgaacgacctacaccgaactgagatacctacagcgtgagctatgagaaagcgccacgcttcccgaagggagaaaggcggacaggtatccggtaagcggcagggtcggaacaggagagcgcacgagggagcttccagggggaaacgcctggtatctttatagtcctgtcgggtttcgccacctctgacttgagcgtcgatttttgtgatgctcgtcaggggggcggagcctatggaaaaacgccagcaacgcggcctttttacggttcctggccttttgctggccttttgctcacatgttctttcctgcgttatcccctgattctgtggataaccgtattaccgcctttgagtgagctgataccgctcgccgcagccgaacgaccgagcgcagcgagtcagtgagcgaggaagcggaagagcgcccaatacgcaaaccgcctctccccgcgcgttggccgattcattaatgca

SEQ ID NO: 1238 - DNA, 1085 bp, Artificial Sequence
  source: /note="Description of Artificial Sequence: Synthetic polynucleotide"
  modified_base (611)..(611): a, c, g, or t
  modified_base (640)..(640): a, c, g, or t
  modified_base (1039)..(1039): a, c, g, or t
tgcccacttacaacaaccatctctacaagcaaatctccagcvvmdcaggagctascaacgacaaccactactttggctacagcaccccttgggggtattttgactttaacagattccactgccacttctcaccacgtgactggcagcgactcattaacaacaactggggattccggcccaagaaactcagcttcaagctcttcaacatccaagttagaggggtcacgcagaacgatggcacgacgactattgccaataaccttaccagcacggttcaagtgtttacggactcggagtatcagctcccgtacgtgctcgggtcggcgcaccaaggctgtctcccgccgtttccagcggacgtcttcatggtccctcagtatggatacctcaccctgaacaacggaagtcaagcggtgggacgctcatccttttactgcctggagtacttcccttcgcagatgctaaggactggaaataacttccaattcagctataccttcgaggatgtaccttttcacagcagctacgctcacagccagagtttggatcgcttgatgaatcctcttattgatcagtatctgtactacctgaacagaacgcaargcamcvcnrgcggaacarccrvcmhsmrsvvsctgvngtttagccaggctgggcctcagtctatgtctttgcaggccagaaattggctacctgggccctgctaccggcaacagagactttcaamarycbmcrvcsrsaacaacaacagtrastttccttggmcagcggccagcamatatcatctcaatggccgcgactcgctggtgaatccaggaccagctatggccagtcacrrggacgatrmsgrsaratttttccctatgcacggcaatctaatatttggcaaasaarrcrscrvsrvarvcratrycgmsdwcgrsvrsgtaatgattacggatgaagaagagattcgtaccaccaatcctgtggcaacagagcagtatggaactgtggcaaataacttgcagrvsvvsmrsrvcvvscccacgdhtvvsrnsgtcvmscatcagggggccttacctggcatggtgtggcaagatcgt

SEQ ID NO: 1239 - protein, 620 aa, Artificial Sequence
  source: /note="Description of Artificial Sequence: Synthetic polypeptide"
  MOD_RES (263)..(264): Any naturally occurring amino acid
  MOD_RES (267)..(267): Any naturally occurring amino acid
  MOD_RES (450)..(453): Any naturally occurring amino acid
  MOD_RES (456)..(460): Any naturally occurring amino acid
  MOD_RES (462)..(462): Any naturally occurring amino acid
  MOD_RES (491)..(495): Any naturally occurring amino acid
  MOD_RES (500)..(500): Any naturally occurring amino acid
  MOD_RES (504)..(504): Any naturally occurring amino acid
  MOD_RES (508)..(508): Any naturally occurring amino acid
  MOD_RES (528)..(528): Any naturally occurring amino acid
  MOD_RES (531)..(533): Any naturally occurring amino acid
  MOD_RES (546)..(557): Any naturally occurring amino acid
  MOD_RES (586)..(590): Any naturally occurring amino acid
  MOD_RES (593)..(595): Any naturally occurring amino acid
  MOD_RES (597)..(597): Any naturally occurring amino acid
MAADGYLPDWLEDNLSEGIREWWALKPGVPQPKANQQHQDNRRGLVLPGYKYLGPGNGLDKGEPVNEADAAALEHDKAYDQQLKAGDNPYLKYNHADAEFQERLQEDTSFGGNLGRAVFQAKKRILEPLGLVEEAAKTAPGKKGAVDQSPQEPDSSSGVGKSGKQPARKRLNFGQTGDSESVPDPQPLGEPPAAPTSLGSNTMASGGGAPMADNNEGADGVGNSSGNWHCDSQWLGDRVITTSTRTWALPTYNNHLYKQISSXXGAXNDNHYFGYSTPWGYFDFNRFHCHFSPRDWQRLINNNWGFRPKKLSFKLFNIQVRGVTQNDGTTTIANNLTSTVQVFTDSEYQLPYVLGSAHQGCLPPFPADVFMVPQYGYLTLNNGSQAVGRSSFYCLEYFPSQMLRTGNNFQFSYTFEDVPFHSSYAHSQSLDRLMNPLIDQYLYYLNRTQXXXXGTXXXXXLXFSQAGPQSMSLQARNWLPGPCYRQQRLSXXXXXNNNSXFPWXAASXYHLNGRDSLVNPGPAMASHXDDXXXFFPMHGNLIFGKXXXXXXXXXXXXVMITDEEEIRTTNPVATEQYGTVANNLQXXXXXPTXXXVXHQGALPGMVWQDRDVYLQGPIWA

SEQ ID NO: 1240 - DNA, 1491 bp, Artificial Sequence
  source: /note="Description of Artificial Sequence: Synthetic polynucleotide"
accaccagcaccagaacctgggccctgcccacttacaacaaccatctctacaagcaaatctccagccaatcaggagcttcaaacgacaaccactactttggctacagcaccccttgggggtattttgactttaacagattccactgccacttctcaccacgtgactggcagcgactcattaacaacaactggggattccggcccaagaaactcagcttcaagctcttcaacatccaagttagaggggtcacgcagaacgatggcacgacgactattgccaataaccttaccagcacggttcaagtgtttacggactcggagtatcagctcccgtacgtgctcgggtcggcgcaccaaggctgtctcccgccgtttccagcggacgtcttcatggtccctcagtatggatacctcaccctgaacaacggaagtcaagcggtgggacgctcatccttttactgcctggagtacttcccttcgcagatgctaaggactggaaataacttccaattcagctataccttcgaggatgtaccttttcacagcagctacgctcacagccagagtttggatcgcttgatgaatcctcttattgatcagtatctgtactacctgaacagaacgcaaggaacaacctctggaacaaccaaccaatcacggctgctttttagccaggctgggcctcagtctatgtctttgcaggccagaaattggctacctgggccctgctaccggcaacagagactttcaaagactgctaacgacaacaacaacagtaactttccttggacagcggccagcaaatatcatctcaatggccgcgactcgctggtgaatccaggaccagctatggccagtcacaaggacgatgaagaaaaatttttccctatgcacggcaatctaatatttggcaaagaagggacaacggcaagtaacgcagaattagataatgtaatgattacggatgaagaagagattcgtaccaccaatcctgtggcaacagagcagtatggaactgtggcaaataacttgcagagctcaaatacagctcccacgactggaactgtcaatcatcagggggccttacctggcatggtgtggcaagatcgtgacgtctaccttcaaggacctatctgggcaaagattcctcacacggatggacactttcatccttctcctctgatgggaggctttggactgaaacatccgcctcctcaaatcatgatcaaaaatactccggtaccggcaaatcctccgacgactttcagcccggccaagtttgcttcatttatcactcagtactccactggacaggtcagcgtggaaattgagtgggagctacagaaagaaaacagcaaacgttggaatccagagattcagtacacttccaactacaacaagtctgttaatgtggactttactgtagacactaatggtgtttatagtgaacctcgccctattggaacccggtatctcacacgaaacttgtga

SEQ ID NO: 1241 - protein, 482 aa, Artificial Sequence
  source: /note="Description of Artificial Sequence: Synthetic polypeptide"
TTSTRTWALPTYNNHLYKQISSQSGASNDNHYFGYSTPWYFDFNRFHCHFSPRDWQRLNNNWGFRPKKLSFKLFNIQRGVTQNDGTTTIANNLTSTQVFTDSEYQLPYVLGSAHQCLPPFPADVFMVPQYGYLTNNGSQAVGRSSFYCLEYFPQMLRTGNNFQFSYTFEDVPHSSYAHSQSLDRLMNPLIDYLYYLNRTQGTTSGTTNQSLLFSQAGPQSMSLQARNWLGPCYRQQRLSKTANDNNNSFPWTAASKYHLNGRDSLVNGPAMASHKDDEEKFFPMHGLIFGKEGTTASNAELDNVMITDEEEIRTTNPVATEQYGTVANNLQSSNTAPTTGTVNHQGALPGMVWQDRDVYLQGPIWAKIPHTDGHFHPSPLMGGFGLKHPPPQIMIKNTPVPANPPTTFSPAKFASFITQYSTGQVSVEIEWELQKENSKRWNPEIQYTSNYNKSVNVDFTVDTNGVYSEPRPIGTRYLTRNL

SEQ ID NO: 1242 - DNA, 1140 bp, Artificial Sequence
  source: /note="Description of Artificial Sequence: Synthetic polynucleotide"
  modified_base (636)..(636): a, c, g, or t
  modified_base (665)..(665): a, c, g, or t
  modified_base (1064)..(1064): a, c, g, or t
accaccagcaccagaacctgggccctgcccacttacaacaaccatctctacaagcaaatctccagcvvmdcaggagctascaacgacaaccactactttggctacagcaccccttgggggtattttgactttaacagattccactgccacttctcaccacgtgactggcagcgactcattaacaacaactggggattccggcccaagaaactcagcttcaagctcttcaacatccaagttagaggggtcacgcagaacgatggcacgacgactattgccaataaccttaccagcacggttcaagtgtttacggactcggagtatcagctcccgtacgtgctcgggtcggcgcaccaaggctgtctcccgccgtttccagcggacgtcttcatggtccctcagtatggatacctcaccctgaacaacggaagtcaagcggtgggacgctcatccttttactgcctggagtacttcccttcgcagatgctaaggactggaaataacttccaattcagctataccttcgaggatgtaccttttcacagcagctacgctcacagccagagtttggatcgcttgatgaatcctcttattgatcagtatctgtactacctgaacagaacgcaargcamcvcnrgcggaacarccrvcmhsmrsvvsctgvngtttagccaggctgggcctcagtctatgtctttgcaggccagaaattggctacctgggccctgctaccggcaacagagactttcaamarycbmcrvcsrsaacaacaacagtrastttccttggmcagcggccagcamatatcatctcaatggccgcgactcgctggtgaatccaggaccagctatggccagtcacrrggacgatrmsgrsaratttttccctatgcacggcaatctaatatttggcaaasaarrcrscrvsrvarvcratrycgmsdwcgrsvrsgtaatgattacggatgaagaagagattcgtaccaccaatcctgtggcaacagagcagtatggaactgtggcaaataacttgcagrvsvvsmrsrvcvvscccacgdhtvvsrnsgtcvmscatcagggggccttacctggcatggtgtggcaagatcgtgacgtctaccttcaaggacctatctgggca

SEQ ID NO: 1243 - protein, 620 aa, Artificial Sequence; identical to SEQ ID NO: 1239
  source: /note="Description of Artificial Sequence: Synthetic polypeptide"
  MOD_RES (263)..(264): Any naturally occurring amino acid
  MOD_RES (267)..(267): Any naturally occurring amino acid
  MOD_RES (450)..(453): Any naturally occurring amino acid
  MOD_RES (456)..(460): Any naturally occurring amino acid
  MOD_RES (462)..(462): Any naturally occurring amino acid
  MOD_RES (491)..(495): Any naturally occurring amino acid
  MOD_RES (500)..(500): Any naturally occurring amino acid
  MOD_RES (504)..(504): Any naturally occurring amino acid
  MOD_RES (508)..(508): Any naturally occurring amino acid
  MOD_RES (528)..(528): Any naturally occurring amino acid
  MOD_RES (531)..(533): Any naturally occurring amino acid
  MOD_RES (546)..(557): Any naturally occurring amino acid
  MOD_RES (586)..(590): Any naturally occurring amino acid
  MOD_RES (593)..(595): Any naturally occurring amino acid
  MOD_RES (597)..(597): Any naturally occurring amino acid

SEQ ID NO: 1244 - protein, 738 aa, Artificial Sequence; identical to SEQ ID NO: 16
  source: /note="Description of Artificial Sequence: Synthetic polypeptide"

SEQ ID NO: 1245 - DNA, 2258 bp, Artificial Sequence
  source: /note="Description of Artificial Sequence: Synthetic polynucleotide"
tcgaggacaacctctctgagggcattcgcgagtggtgggacttgaaacctggagccccgaaacccaaagccaaccagcaaaagcaggacgacggccggggtctggtgcttcctggctacaagtacctcggacccttcaacggactcgacaagggggagcccgtcaacgcggcggacgcagcggccctcgagcacgacaaggcctacgaccagcagctcaaagcgggtgacaatccgtacctgcggtataaccacgccgacgccgagtttcaggagcgtctgcaagaagatacgtcttttgggggcaacctcgggcgagcagtcttccaggccaagaagcgggttctcgaacctctcggtctggttgaggaaggcgctaagacggctcctggaaagaagagaccggtagagccatcaccccagcgttctccagactcctctacgggcatcggcaagaaaggccagcagcccgcgaaaaagagactcaactttgggcagactggcgactcagagtcagtgcccgaccctcaaccaatcggagaaccccccgcaggcccctctggtctgggatctggtacaatggctgcaggcggtggcgctccaatggcagacaataacgaaggcgccgacggagtgggtagttcctcaggaaattggcattgcgattccacatggctgggcgacagagtcatcaccaccagcacccgaacctgggccctccccacctacaacaaccacctctacaagcaaatctccaacgggacttcgggaggaagcaccaacgacaacacctacttcggctacagcaccccctgggggtattttgactttaacagattccactgccacttctcaccacgtgactggcagcgactcatcaacaacaactggggattccggcccaagagactcaacttcaagctcttcaacatccaggtcaaggaggtcacgcagaatgaaggcaccaagaccatcgccaataaccttaccagcacgattcaggtctttacggactcggaataccagctcccgtacgtcctcggctctgcgcaccagggctgcctgcctccgttcccggcggacgtcttcatgattcctcagtacgggtacctgactctgaacaatggcagtcaggccgtgggccgttcctccttctactgcctggagtactttccttctcaaatgctgagaacgggcaacaactttgagttcagctaccagtttgaggacgtgccttttcacagcagctacgcgcacagccaaagcctggaccggctgatgaaccccctcatcgaccagtacctgtactacctgtctcggactcagtccacgggaggtaccgcaggaactcagcagttgctattttctcaggccgggcctaataacatgtcggctcaggccaaaaactggctacccgggccctgctaccggcagcaacgcgtctccacgacactgtcgcaaaataacaacagcaactttgcctggaccggtgccaccaagtatcatctgaatggcagagactctctggtaaatcccggtgtcgctatggcaacccacaaggacgacgaagagcgattttttccgtccagcggagtcttaatgtttgggaaacagggagctggaaaagacaacgtggactatagcagcgttatgctaaccagtgaggaagaaattaaaaccaccaacccagtggccacagaacagtacggcgtggtggccgataacctgcaacagcaaaacgccgctcctattgtaggggccgtcaacagtcaaggagccttacctggcatggtctggcagaaccgggacgtgtacctgcagggtcctatctgggccaagattcctcacacggacggaaactttcatccctcgccgctgatgggaggctttggactgaaacacccgcctcctcagatcctgattaagaatacacctgttcccgcggatcctccaactaccttcagtcaagctaagctggcgtcgttcatcacgcagtacagcaccggacaggtcagcgtggaaattgaatgggagctgcagaaagaaaacagcaaacgctggaacccagagattcaatacacttccaactactacaaatctacaaatgtggactttgctgttaacacagatggcacttattctgagcctcgccccatcggcacccgttacctcacccgtaatctgtaattgcttgttaatcaataaaccggttgattcgtttcagttgaactttggtctctgcgaagggcgaattcgttt

SEQ ID NO: 1246 - DNA, 2208 bp, Artificial Sequence
  source: /note="Description of Artificial Sequence: Synthetic polynucleotide"
atggctgccgatggttatcttccagattggctcgaggacactctctctgaaggaataagacagtggtggaagctcaaacctggcccaccaccaccaaagcccgcagagcggcataaggacgacagcaggggtcttgtgcttcctgggtacaagtacctcggacccttcaacggactcgacaagggagagccggtcaacgaggcagacgccgcggccctcgagcacgacaaagcctacgaccggcagctcgacagcggagacaacccgtacctcaagtacaaccacgccgacgcggagtttcaggagcgccttaaagaagatacgtcttttgggggcaacctcggacgagcagtcttccaggcgaaaaagagggttcttgaacctctgggcctggttgaggaacctgttaagacggctccgggaaaaaagaggccggtagagcactctcctgtggagccagactcctcctcgggaaccggaaaggcgggccagcagcctgcaagaaaaagattgaattttggtcagactggagacgcagactcagtacctgacccccagcctctcggacagccaccagcagccccctctggtctgggaactaatacgatggctacaggcagtggcgcaccaatggcagacaataacgagggcgccgacggagtgggtaattcctcgggaaattggcattgcgattccacatggatgggcgacagagtcatcaccaccagcacccgaacctgggccctgcccacctacaacaaccacctctacaaacaaatttccagccaatcaggagcctcgaacgacaatcactactttggctacagcaccccttgggggtattttgacttcaacagattccactgccacttttcaccacgtgactggcaaagactcatcaacaacaactggggattccgacccaagagactcaacttcaagctctttaacattcaagtcaaagaggtcacgcagaatgacggtacgacgacgattgccaataaccttaccagcacggttcaggtgtttactgactcggagtaccagctcccgtacgtcctcggctcggcgcatcaaggatgcctcccgccgttcccagcagacgtcttcatggtgccacagtatggatacctcaccctgaacaacgggagtcaggcagtaggacgctcttcattttactgcctggagtactttccttctcagatgctgcgtaccggaaacaactttaccttcagctacacttttgaggacgttcctttccacagcagctacgctcacagccagagtctggaccgtctcatgaatcctctcatcgaccagtacctgtatttcttaagcagaacaaacactccaagtggaaccaccacgcagtcaaggcttcagttttctcaggccggagcgagtgacattcgggaccagtctaggaactggcttcctggaccctgttaccgccagcagcgagtatcaaagacatctgcggataacaacaacagtgaattctcgtggaccggtgctaccaagtaccacctcaatggcagagactctctggtgaatccgggcccggccatggcaagccacaaggacgatgaagaaaagttttttcctcagagcggggttctcatctttgggaagcaaggctcagagaaaacaaatgtggacattgaaaaggtcatgattacagacgaagaggaaatcaggacaaccaatcccgtggctacggagcagtatggttctgtatctaccaacctccagagaggcaacagacaagcagctaccgcagatgtcaacacacaaggcgttcttccaggcatggtctggcaggacagagatgtgtaccttcaggggcccatctgggcaaagattccacacacggacggacattttcacccctctcccctcatgggtggattcggacttaaacaccctcctccacagattctcatcaagaacaccccggtacctgcgaatccttcgaccaccttcagtgcggcaaagtttgcttccttcatcacacagtactccacgggacaggtcagcgtggagatcgagtgggagctgcagaaggaaaacagcaaacgctggaatcccgaaattcagtacacttccaactacaacaagtctgttaatgtggactttactgtggacactaatggcgtgtattcagagcctcgccccattggtaccagattcctgactcgtaatctgtaa

SEQ ID NO: 1247 - protein, 737 aa, Artificial Sequence
  source: /note="Description of Artificial Sequence: Synthetic polypeptide"
MAADGYLPDWLEDNLSEGIREWWDLKPGAPKPKANQQKQDNGRGLVLPGYKYLGPFNGLDKGEPVNAADAAALEHDKAYDQQLQAGDNPYLRYNHADAEFQERLQEDTSFGGNLGRAVFQAKKRVLEPLGLVESPVKTAPGKKRPVEPSPQRSPDSSTGIGKKGQQPAKKRLNFGQTGDSESVPDPQPIGEPPAAPSGVGPNTMAAGGGAPMADNNEGADGVGSSSGNWHCDSTWLGDRVITTSTRTWALPTYNNHLYKQISNGTSGGSTNDNTYFGYSTPWGYFDFNRFHCHFSPRDWQRLINNNWGFRPKRLNFKLFNIQVKEVTQNEGTKTIANNLTSTIQVFTDSEYQLPYVLGSAHQGCLPPFPADVFMIPQYGYLTLNNGSQAVGRSSFYCLEYFPSQMLRTGNNFEFSYNFEDVPFHSSYAHSQSLDRLMNPLIDQYLYYLSRTQSTGGTAGTQQLLFSQAGPNNMSAQAKNWLPGPCYRQQRVSTTLSQNNNSNFAWTGATKYHLNGRDSLVNPGVAMATHKDDEERFFPSSGVLMFGKQGAGKDNVDYSSVMLTSEEEIKTTNPVATEQYGWADNLQQQNAAPIVGAVNSQGALPGMVWQNRDVYLQGPIWAKIPHTDGNFHPSPLMGGFGLKHPPPQILIKNTPVPADPPTTFNQAKLASFITQYSTGQVSVEIEWELQKENSKRWNPEIQYTSNYYKSTNVDFAVNTEGTYSEPRPIGTRYLTRNL

SEQ ID NO: 1248 - DNA, 2211 bp, Artificial Sequence
  source: /note="Description of Artificial Sequence: Synthetic polynucleotide"
atggctgccgatggttatcttccagattggctcgaggacactctctctgaaggaataagacagtggtggaagctcaaacctggcccaccaccaccaaagcccgcagagcggcataaggacgacagcaggggtcttgtgcttcctgggtacaagtacctcggacccttcaacggactcgacaagggagagccggtcaacgaggcagacgccgcggccctcgagcacgacaaagcctacgaccggcagctcgacagcggagacaacccgtacctcaagtacaaccacgccgacgcggagtttcaggagcgccttaaagaagatacgtcttttgggggcaacctcggacgagcagtcttccaggcgaaaaagagggttcttgaacctctgggcctggttgaggaacctgttaagacggctccgggaaaaaagaggccggtagagcactctcctgtggagccagactcctcctcgggaaccggaaaggcgggccagcagcctgcaagaaaaagattgaattttggtcagactggagacgcagactcagtacctgacccccagcctctcggacagccaccagcagccccctctggtctgggaactaatacgatggctacaggcagtggcgcaccaatggcagacaataacgagggcgccgacggagtgggtaattcctcgggaaattggcattgcgattccacatggatgggcgacagagtcatcaccaccagcacccgaacctgggccctgcccacctacaacaaccacctctacaaacaaatttccagcgcttcaacgggagcctcgaacgacaatcactactttggctacagcaccccttgggggtattttgacttcaacagattccactgccacttttcaccacgtgactggcaaagactcatcaacaacaactggggattccgacccaagagactcaacttcaagctctttaacattcaagtcaaagaggtcacgcagaatgacggtacgacgacgattgccaataaccttaccagcacggttcaggtgtttactgactcggagtaccagctcccgtacgtcctcggctcggcgcatcaaggatgcctcccgccgttcccagcagacgtcttcatggtgccacagtatggatacctcaccctgaacaacgggagtcaggcagtaggacgctcttcattttactgcctggagtactttccttctcagatgctgcgtaccggaaacaactttaccttcagctacacttttgaggacgttcctttccacagcagctacgctcacagccagagtctggaccgtctcatgaatcctctcatcgaccagtacctgtattacttgagcagaacaaacactccaagtggaaccaccacgcagtcaaggcttcagttttctcaggccggagcgagtgacattcgggaccagtctaggaactggcttcctggaccctgttaccgccagcagcgagtatcaaagacatctgcggataacaacaacagtgaatactcgtggactggagctaccaagtaccacctcaatggcagagactctctggtgaatccgggcccggccatggcaagccacaaggacgatgaagaaaagttttttcctcagagcggggttctcatctttgggaagcaaggctcagagaaaacaaatgtggacattgaaaaggtcatgattacagacgaagaggaaatcaggacaaccaatcccgtggctacggagcagtatggttctgtatctaccaacctccagagaggcaacagacaagcagctaccgcagatgtcaacacacaaggcgttcttccaggcatggtctggcaggacagagatgtgtaccttcaggggcccatctgggcaaagattccacacacggacggacattttcacccctctcccctcatgggtggattcggacttaaacaccctcctccacagattctcatcaagaacaccccggtacctgcgaatccttcgaccaccttcagtgcggcaaagtttgcttccttcatcacacagtactccacgggacaggtcagcgtggagatcgagtgggagctgcagaaggaaaacagcaaacgctggaatcccgaaattcagtacacttccaactacgccaagtctgtcaatgtggactttactgtggacaataatggcgtgtattcagagcctcgccccattggcaccagatacctgactcgtaatctgtaa

SEQ ID NO: 1249 - DNA, 2208 bp, Artificial Sequence
  source: /note="Description of Artificial Sequence: Synthetic polynucleotide"
atggctgccgatggttatcttccagattggctcgaggacaacctctctgagggcattcgcgagtggtgggacttgaaacctggagccccgaagcccaaagccaaccagcaaaagcaggacgacggccggggtctggtgcttcctggctacaagtacctcggacccttcaacggactcgacaagggggagcccgtcaacgcggcggacgcagcggccctcgagcacgacaaggcctacgaccagcagctcaaagcgggtgacaatccgtacctgcggtataaccacgccgacgccgagtttcaggagcgtctgcaagaagatacgtcttttgggggcaacctcgggcgagcagtcttccaggccaagaagcgggttctcgaacctctcggtctggttgaggaaggcgctaagacggctcctggaaagaaacgtccggtagagcagtcgccacaagagccagactcctcctcgggcatcggcaagacaggccagcagcccgctaaaaagagactcaattttggtcagactggcgactcagagtcagtccccgatccacaacctctcggagaacctccagcaacccccgctgctgtgggacctactacaatggcttcaggcggtggcgcaccaatggcagacaataacgaaggcgccgacggagtgggtaatgcctcaggaaattggcattgcgattccacatggctgggcgacagagtcatcaccaccagcacccgcacctgggccttgcccacctacaataaccacctctacaagcaaatctccagtgcttcaggggccagcaacgacaaccactacttcggctacagcaccccctgggggtattttgatttcaacagattccactgccacttttcaccacgtgactggcagcgactcatcaacaacaattggggattccggcccaagagactcaacttcaaactcttcaacatccaagtcaaggaggtcacgacgaatgatggcgtcacaaccatcgctaataaccttaccagcacggttcaagtcttctcggactcggagtaccagcttccgtacgtcctcggctctgcgcaccagggctgcctccctccgttcccggcggacgtgttcatgattccgcaatacggctacctgacgctcaacaatggcagccaagccgtgggacgttcatccttttactgcctggaatatttcccttctcagatgctgagaacgggcaacaactttaccttcagctacacctttgaggaagtgcctttccacagcagctacgcgcacagccagagcctggaccggctgatgaatcctctcatcgaccaatacctgtattacctgaacagaactcaaaatcagtccggaagtgcccaaaacaaggacttgctgtttagccgtgggtctccagctggcatgtctgttcagcccaaaaactggctacctggaccctgttatcggcagcagcgcgtttctaaaacaaaaacagacaacaacaacagcaattttacctggactggtgcttcaaaatataacctcaatgggcgtgaatccatcatcaaccctggcactgctatggcctcacacaaagacgacgaagacaagttctttcccatgagcggtgtcatgatttttggaaaagagagcgccggagcttcaaacactgcattggacaatgtcatgattacagacgaagaggaaattaaagccactaaccctgtggccaccgaaagatttgggaccgtggcagtcaatttccagagcagcagcacagaccctgcgaccggagatgtgcatgctatgggagcattacctggcatggtgtggcaagatagagacgtgtacctgcagggtcccatttgggccaaaattcctcacacagatggacactttcacccgtctcctcttatgggcggctttggactcaagaacccgcctcctcagatcctcatcaaaaacacgcctgttcctgcgaatcctccggcggagttttcagctacaaagtttgcttcattcatcacccaatactccacaggacaagtgagtgtggaaattgaatgggagctgcagaaagaaaacagcaagcgctggaatcccgaagtgcagtacacatccaattatgcaaaatctgccaacgttgattttactgtggacaacaatggactttatactgagcctcgccccattggcacccgttaccttacccgtcccctgtaa

SEQ ID NO: 1250 - DNA, 2205 bp, Artificial Sequence
  source: /note="Description of Artificial Sequence: Synthetic polynucleotide"
atggctgccgatggttatcttccagattggctcgaggacaacctctdgagggcattcgcgagtggtgggacttgaaacctggagccccgaaacccaaagccaaccagcaaaagcaggacgacggccggggtdggtgcttcctggctacaagtacctcggacccttcaacggactcgacaagggggagcccgtcaacgcggcggatgcagcggccctcgagcacgacaaggcctacgaccagcagctcaaagcgggtgacaatccgtacctgcggtataaccacgccgacgccgagtttcaggagcgtctgcaagaagatacgtcttttgggggcaacctcgggcgagcagtcttccaggccaagaagagggttctcgaaccttttggtdggttgaggaaggtgctaagacggctcctggaaagaaacgtccggtagagcagtcgccacaagagccagactcctcctcgggcattggcaagacaggccagcagcccgctaaaaagagactcaattttggtcagactggcgactcagagtcagtccccgacccacaacctctcggagaacctccagcaacccccgctgctgtgggacctactacaatggcttcaggcggtggcgcaccaatggcagacaataacgaaggcgccgacggagtgggtaatgcctcaggaaattggcattgcgattccacatggctgggcgacagagtcatcaccaccagcacccgaacatgggccttgcccacctataacaaccacctctacaagcaaatctccagtgcttcaggggccagcaacgacaaccactacttcggctacagcaccccctgggggtattttgatttcaacagattccactgccatttctcaccacgtgactggcagcgactcatcaacaacaattggggattccggcccaagagactcaacttcaagctcttcaacatccaagtcaaggaggtcacgacgaatgatggcgtcacgaccatcgctaataaccttaccagcacggttcaagtcttctcggactcggagtaccagttgccgtacgtcctcggctctgcgcaccagggctgcctccctccgttcccggcggacgtgttcatgattccgcagtacggctacctaacgctcaacaatggcagccaggcagtgggacggtcatccttttactgcctggaatatttcccatcgcagatgctgagaacgggcaataactttaccttcagctacaccttcgaggacgtgcctttccacagcagctacgcgcacagccagagcctggaccggctgatgaatcctctcatcgaccagtacctgtattacctgaacagaactcagaatcagtccggaagtgcccaaaacaaggacttgctgtttagccgggggtctccagctggcatgtctgttcagcccaaaaactggctacctggaccctgttaccggcagcagcgcgtttctaaaacaaaaacagacaacaacaacagcaactttacctggactggtgcttcaaaatataaccttaatgggcgtgaatctataatcaaccctggcactgctatggcctcacacaaagacgacaaagacaagttctttcccatgagcggtgtcatgatttttggaaaggagagcgccggagcttcaaacactgcattggacaatgtcatgatcacagacgaagaggaaatcaaagccactaaccccgtggccaccgaaagatttgggactgtggcagtcaatctccagagcagcagcacagaccctgcgaccggagatgtgcatgttatgggagccttacctggaatggtgtggcaagacagagacgtatacctgcagggtcctatttgggccaaaattcctcacacggatggacactttcacccgtctcctctcatgggcggctttggacttaagcacccgcctcctcagatcctcatcaaaaacacgcctgttcctgcgaatcctccggcagagttttcggctacaaagtttgcttcattcatcacccagtattccacaggacaagtgagcgtggagattgaatgggagctgcagaaagaaaacagcaaacgctggaatcccgaagtgcagtatacatctaactatgcaaaatctgccaacgttgatttcactgtggacaacaatggactttatactgagcctcgccccattggcacccgttacctcacccgtcccctgtaa

SEQ ID NO: 1251 - DNA, 2208 bp, Artificial Sequence
  source: /note="Description of Artificial Sequence: Synthetic polynucleotide"
atggctgccgatggttatcttccagattggctcgaggacaacctctctgagggcattcgcgagtggtgggacttgaaacctggagccccgaaacccaaagccaaccagcaaaagcaggacgacggccggggtctggtgcttcctggctacaagtacctcggacccttcaacggactcgacaagggggagcccgtcaacgcggcggatgcagcggccctcgagcacgacaaggcctacgaccagcagctcaaagcgggtgacaatccgtacctgcggtataaccacgccgacgccgagtttcaggagcgtctgcaagaagatacgtcttttgggggcaacctcgggcgagcagtcttccaggccaagaagagggttctcgaaccttttggtctggttgaggaaggtgctaagacggctcctggaaagaaacgtccggtagagcagtcgccacaagagccagactcctcctcgggcattggcaagacaggccagcagcccgctaaaaagagactcaattttggtcagactggcgactcagagtcagtccccgacccacaacctctcggagaacctccagcaacccccgctgctgtgggacctactacaatggcttcaggcggtggcgcaccaatggcagacaataacgaaggcgccgacggagtgggtaatgcctcaggaaattggcattgcgattccacatggctgggcgacagagtcatcaccaccagcacccgaacatgggccttgcccacctataacaaccacctctacaagcaaatctccagtgcttcaggggccagcaacgacaaccactacttcggctacagcaccccctgggggtattttgatttcaacagattccactgccatttctcaccacgtgactggcagcgactcatcaacaacaattggggattccggcccaagagactcaacttcaagctcttcaacatccaagtcaaggaggtcacgacgaatgatggcgtcacgaccatcgctaataaccttaccagcacggttcaagtcttctcggactcggagtaccagttgccgtacgtcctcggctctgcgcaccagggctgcctccctccgttcccggcggacgtgttcatgattccgcagtacggctacctaacgctcaacaatggcagccaggcagtgggacggtcatccttttactgcctggaatatttcccatcgcagatgctgagaacgggcaataactttaccttcagctacaccttcgaggacgtgcctttccacagcagctacgcgcacagccagagcctggaccggctgatgaatcctctcatcgaccagtacctgtattacctgaacagaactcagaatcagtccggaagtgcccaaaacaaggacttgctgtttagccgggggtctccagctggcatgtctgttcagcccaaaaactggctacctggaccctgttaccggcagcagcgcgtttctaaaacaaaaacagacaacaacaacagcaactttacctggactggtgcttcaaaatataaccttaatgggcgtgaatctataatcaaccctggcactgctatggcctcacacaaagacgacgaagacaagttctttcccatgagcggtgtcatgatttttggaaaggagagcgccggagcttcaaacactgcattggacaatgtcatgatcacagacgaagaggaaatcaaagccactaaccccgtggccaccgaaagatttgggactgtggcagtcaatctccagagcagcagcacagaccctgcgaccggagatgtgcatgttatgggagccttacctggaatggtgtggcaagacagagacgtatacctgcagggtcctatttgggccaaaattcctcacacggatggacactttcacccgtctcctctcatgggcggctttggacttaagcacccgcctcctcagatcctcatcaaaaacacgcctgttcctgcgaatcctccggcagagttttcggctacaaagtttgcttcattcatcacccagtattccacaggacaagtgagcgtggagattgaatgggagctgcagaaagaaaacagcaaacgctggaatcccgaagtgcagtatacatctaactatgcaaaatctgccaacgttgatttcactgtggacaacaatggactttatactgagcctcgccccattggcacccgttacctcacccgtcccctgtaa

SEQ ID NO: 1252 - DNA, 2208 bp, Artificial Sequence
  source: /note="Description of Artificial Sequence: Synthetic polynucleotide"
atggctgccgatggttatcttccagattggctcgaggacactctctctgaaggaataagacagtggtggaagctcaaacctggcccaccaccaccaaagcccgcagagcggcataaggacgacagcaggggtcttgtgcttcctgggtacaagtacctcggacccttcaacggactcgacaagggagagccggtcaacgaggcagacgccgcggccctcgagcacgacaaagcctacgaccggcagctcgacagcggagacaacccgtacctcaagtacaaccacgccgacgcggagtttcaggagcgccttaaagaagatacgtcttttgggggcaacctcggacgagcagtcttccaggcgaaaaagagggttcttgaacctctgggcctggttgaggaacctgttaagacggctccgggaaaaaagaggccggtagagcactctcctgtggagccagactcctcctcgggaaccggaaaggcgggccagcagcctgcaagaaaaagattgaattttggtcagactggagacgcagactcagtacctgacccccagcctctcggacagccaccagcagccccctctggtctgggaactaatacgatggctacaggcagtggcgcaccaatggcagacaataacgagggcgccgacggagtgggtaattcctcgggaaattggcattgcgattccacatggatgggcgacagagtcatcaccaccagcacccgaacctgggccctgcccacctacaacaaccacctctacaaacaaatttccagccaatcaggagcctcgaacgacaatcactactttggctacagcaccccttgggggtattttgacttcaacagattccactgccacttttcaccacgtgactggcaaagactcatcaacaacaactggggattccgacccaagagactcaacttcaagctctttaacattcaagtcaaagaggtcacgcagaatgacggtacgacgacgattgccaataaccttaccagcacggttcaggtgtttactgactcggagtaccagctcccgtacgtcctcggctcggcgcatcaaggatgcctcccgccgttcccagcagacgtcttcatggtgccacagtatggatacctcaccctgaacaacgggagtcaggcagtaggacgctcttcattttactgcctggagtactttccttctcagatgctgcgtaccggaaacaactttaccttcagctacacttttgaggacgttcctttccacagcagctacgctcacagccagagtctggaccgtctcatgaatcctctcatcgaccagtacctgtattacttgagcagaacaaacactccaagtggaaccaccacgcagtcaaggcttcagttttctgtggccggacccagtaacatggctgtccagggaaggaactggcttcctggaccctgttaccgccagcagcgagtatcaaagacatctgcggataacaacaacagtgaatttgcttggactggagctaccaagtaccacctcaatggcagagactctctggtgaatccgggcccggccatggcaagccacaaggacgatgaagaaaagttttttcctcagagcggggttctcatctttgggaagcaaggctcagagaaaacaaatgtggacattgaaaaggtcatgattacagacgaagaggaaatcaggacaaccaatcccgtggctacggagcagtatggttctgtatctaccaacctccagcaacagaacacagcaccagctaccgcagatgtcaacacacaaggcgttcttccaggcatggtctggcaggacagagatgtgtaccttcaggggcccatctgggcaaagattccacacacggacggacattttcacccctctcccctcatgggtggattcggacttaaacaccctcctccacagattctcatcaagaacaccccggtacctgcgaatccttcgaccaccttcagtgcggcaaagtttgcttccttcatcacacagtactccacgggacaggtcagcgtggagatcgagtgggagctgcagaaggaaaacagcaaacgctggaatcccgaaattcagtacacttccaactacaacaagtctgttaatgtggactttactgtggacactaatggcgtgtattcagagcctcgccccattggcaccagatacctgactcgtaatctgtaa

SEQ ID NO: 1253 - protein, 735 aa, Artificial Sequence
  source: /note="Description of Artificial Sequence: Synthetic polypeptide"
MAADGYLPDWLEDTLSEGIRQWWKLKPGPPPPKPAERHKDDSRGLVLPGYKYLGPFNGLDKGEPVNEADAAALEHDKAYDRQLDSGDNPYLKYNHADAEFQERLKEDTSFGGNLGRAVFQAKKRVLEPLGLVEEPVKTAPGKKRPVEHSPVEPDSSSGTGKAGQQPARKRLNFGQTGDADSVPDPQPLGQPPAAPSGLGTNTMATGSGAPMADNNEGADGVGNSSGNWHCDSTWMGDRVITTSTRTWALPTYNNHLYKQISSQSGASNDNHYFGYSTPWGYFDFNRFHCHFSPRDWQRLINNNWGFRPKRLNFKLFNIQVKEVTQNDGTTTIANNLTSTVQVFTDSEYQLPYVLGSAHQGCLPPFPADVFMVPQYGYLTLNNGSQAVGRSSFYCLEYFPSQMLRTGNNFTFSYTFEDVPFHSSYAHSQSLDRLMNPLIDQYLYYLSRTNTPSGTTTQSRLQFSVAGPSNMAVQGRNWLPGPCYRQQRVSKTSADNNNSEFAWTGATKYHLNGRDSLVNPGPAMASHKDDEEKFFPQSGVLIFGKQGSEKTNVDIEKVMITDEEEIRTTNPVATEQYGSVSTNLQQQNTAPATADVNTQGVLPGMVWQDRDVYLQGPIWAKIPHTDGHFHPSPLMGGFGLKHPPPQILIKNTPVPANPSTTFSAAKFASFITQYSTGQVSVEIEWELQKENSKRWNPEIQYTSNYNKSVNVDFTVDTNGVYSEPRPIGTRYLTRNL

SEQ ID NO: 1254 - DNA, 2208 bp, Artificial Sequence
  source: /note="Description of Artificial Sequence: Synthetic polynucleotide"
atggctgccgatggttatcttccagattggctcgaggacactctctctgaaggaataagacagtggtggaagctcaaacctggcccaccaccaccaaagcccgcagagcggcataaggacgacagcaggggtcttgtgcttcctgggtacaagtacctcggacccttcaacggactcgacaagggagagccggtcaacgaggcagacgccgcggccctcgagcacgacaaagcctacgaccggcagctcgacagcggagacaacccgtacctcaagtacaaccacgccgacgcggagtttcaggagcgccttaaagaagatacgtcttttgggggcaacctcggacgagcagtcttccaggcgaaaaagaggattcttgaacctctgggcctggttgaggaacctgttaagacggctccgggaaaaaagaggccggtagagcactctcctgcggagccagactcctcctcgggaaccggaaagtcgggccagcagcctgcaagaaaaagattgaattttggtcagactggagacgcagactcagtacctgacccccagcctctcggacagccaccagcagccccctctggtctgggaactaatacgatggcttcaggcagtggcgcaccaatggcagacaataacgagggcgccgacggagtgggtaattcctcgggaaattggcattgcgattccacatggatgggcgacagagtcatcaccaccagcacccgaacctgggccctgcccacctacaacaaccacctctacaaacaaatttccagccaatcaggagcctcgaacgacaatcactactttggctacagcaccccttgggggtattttgacttcaacagattccactgccacttttcaccacgtgactggcaaagactcatcaacaacaactggggattccgacccaagagactcagcttcaagctctttaacattcaagtcaaagaggtcacgcagaatgacggtacgacgacgattgccaataaccttaccagcacggttcaggtgtttactgactcggagtaccagctcccgtacgtcctcggctcggcgcatcaaggatgcctcccgccgttcccagcagacgtcttcatggtgccacagtatggatacctcaccctgaacaacgggagtcaggcagtaggacgctcttcattttactgcctggagtactttccttctcagatgctgcgtaccggaaacaactttaccttcagctacacttttgaggacgttcctttccacagcagctacgctcacagccagagtctggaccgtctcatgaatcctctcatcgaccagtacctgtattacttgagcagaacaaacactccaagtggaaccaccacgatgtcaaggcttcagttttctcaggccggagcgagtgacattcgggaccagtctaggaactggcttcctggaccctgttaccgccagcagcgagtatcaaagacagctgcggataacaacaacagtgattactcgtggactggagctaccaagtaccacctcaatggcagagactctctggtgaatccgggcccggccatggcaagccacaaggacgatgaagaaaagtattttcctcagagcggggttctcatctttgggaagcaagactcaggaaaaacaaatgtggacattgaaaaggtcatgattacagacgaagaggaaatcaggacaaccaatcccgtggctacggagcagtatggttctgtatctaccaacctccagagcggcaacacacaagcagctacctcagatgtcaacacacaaggcgttcttccaggcatggtctggcaggacagagatgtgtaccttcaggggcccatctgggcaaagattccacacacggacggacattttcacccctctcccctcatgggtggattcggacttaaacaccctcctccacagattctcatcaagaacaccccggtacctgcgaatccttcgaccaccttcagtgcggcaaagtttgcttccttcatcacacagtactccacgggacaggtcagcgtggagatcgagtgggagctgcagaaggaaaacagcaaacgctggaatcccgaaattcagtacacttccaactacaacaagtctgttaatgtggactttactgtggacactaatggcgtgtattcagagcctcgccccattggcaccagatacctgactcgtaatctgtaa

SEQ ID NO: 1255 - DNA, 2208 bp, Artificial Sequence
  source: /note="Description of Artificial Sequence: Synthetic polynucleotide"
atggctgccgatggttatcttccagattggctcgaggacactctctctgaaggaataagacagtggtggaagctcaaacctggcccaccaccaccaaagcccgcagagcggcataaggacgacagcaggggtcttgtgcttcctgggtacaagtacctcggacccttcaacggactcgacaagggagagccggtcaacgaggcagacgccgcggccctcgagcacgacaaagcctacgaccggcagctcgacagcggagacaacccgtacctcaagtacaaccacgccgacgcggagtttcaggagcgccttaaagaagatacgtcttttgggggcaacctcggacgagcagtcttccaggcgaaaaagaggattcttgaacctctgggcctggttgaggaacctgttaagacggctccgggaaaaaagaggccggtagagcactctcctgcggagccagactcctcctcgggaaccggaaagtcgggccagcagcctgcaagaaaaagattgaattttggtcagactggagacgcagactcagtacctgacccccagcctctcggacagccaccagcagccccctctggtctgggaactaatacgatggcttcaggcagtggcgcaccaatggcagacaataacgagggcgccgacggagtgggtaattcctcgggaaattggcattgcgattccacatggatgggcgacagagtcatcaccaccagcacccgaacctgggccctgcccacctacaacaaccacctctacaaacaaatttccagccaatcaggagcctcgaacgacaatcactactttggctacagcaccccttgggggtattttgacttcaacagattccactgccacttttcaccacgtgactggcaaagactcatcaacaacaactggggattccgacccaagagactcaacttcaagctctttaacattcaagtcaaagaggtcacgcagaatgacggtacgacgacgattgccaataaccttaccagcacggttcaggtgtttactgactcggagtaccagctcccgtacgtcctcggctcggcgcatcaaggatgcctcccgccgttcccagcagacgtcttcatggtgccacagtatggatacctcaccctgaacaacgggagtcaggcagtaggacgctcttcattttactgcctggagtactttccttctcagatgctgcgtaccggaaacaactttaccttcagctacacttttgaggacgttcctttccacagcagctacgctcacagccagagtctggaccgtctcatgaatcctctcatcgaccagtacctgtattacttgagcagaacaaacactccaagtggaaccaccacgatgtcaaggcttcagttttctcaggccggagcgagtgacattcgggaccagtctaggaactggcttcctggaccctgttaccgccagcagcgagtatcaaagacagctgcggataacaacaacagtgattactcgtggactggagctaccaagtaccacctcaatggcagagactctctggtgaatccgggcccggccatggcaagccacaaggacgatgaagaaaagtattttcctcagagcggggttctcatctttgggaagcaagactcaggaaaaacaaatgtggacattgaaaaggtcatgattacagacgaagaggaaatcaggacaaccaatcccgtggctacggagcagtatggttctgtatctaccaacctccagagcggcaacacacaagcagctacctcagatgtcaacacacaaggcgttcttccaggcatggtctggcaggacagagatgtgtaccttcaggggcccatctgggcaaagattccacacacggacggacattttcacccctctcccctcatgggtggattcggacttaaacaccctcctccacagattctcatcaagaacaccccggtacctgcgaatccttcgaccaccttcagtgcggcaaagtttgcttccttcatcacacagtactccacgggacaggtcagcgtggagatcgagtgggagctgcagaaggaaaacagcaaacgctggaatcccgaaattcagtacacttccaactacaacaagtctgttaatgtggactttactgtggacactaatggcgtgtattcagagcctcgccccattggcaccagatacctgactcgtaatctgtaa

SEQ ID NO: 1256 - protein, 735 aa, Artificial Sequence
  source: /note="Description of Artificial Sequence: Synthetic polypeptide"
MAADGYLPDWLEDTLSEGIRQWWKLKPGPPPPKPAERHKDDSRGLVLPGYKYLGPFNGLDKGEPVNEADAAALEHDKAYDRQLDSGDNPYLKYNHADAEFQERLKEDTSFGGNLGRAVFQAKKRILEPLGLVEEPVKTAPGKKRPVEHSPAEPDSSSGTGKSGQQPARKRLNFGQTGDADSVPDPQPLGQPPAAPSGLGTNTMASGSGAPMADNNEGADGVGNSSGNWHCDSTWMGDRVITTSTRTWALPTYNNHLYKQISSQSGASNDNHYFGYSTPWGYFDFNRFHCHFSPRDWQRLINNNWGFRPKRLNFKLFNIQVKEVTQNDGTTTIANNLTSTVQVFTDSEYQLPYVLGSAHQGCLPPFPADVFMVPQYGYLTLNNGSQAVGRSSFYCLEYFPSQMLRTGNNFTFSYTFEDVPFHSSYAHSQSLDRLMNPLIDQYLYYLSRTNTPSGTTTMSRLQFSQAGASDIRDQSRNWLPGPCYRQQRVSKTAADNNNSDYSWTGATKYHLNGRDSLVNPGPAMASHKDDEEKYFPQSGVLIFGKQDSGKTNVDIEKVMITDEEEIRTTNPVATEQYGSVSTNLQSGNTQAATSDVNTQGVLPGMVWQDRDVYLQGPIWAKIPHTDGHFHPSPLMGGFGLKHPPPQILIKNTPVPANPSTTFSAAKFASFITQYSTGQVSVEIEWELQKENSKRWNPEIQYTSNYNKSVNVDFTVDTNGVYSEPRPIGTRYLTRNL

SEQ ID NO: 1257 - protein, 736 aa, Artificial Sequence
  source: /note="Description of Artificial Sequence: Synthetic polypeptide"
MAADGYLPDWLEDNLSEGIREWWDLKPGAPKPKANQQKQDDGRGLVLPGYKYLGPFNGLDKGEPVNAADAAALEHDKAYDQQLKAGDNPYLRYNHADAEFQERLQEDTSFGGNLGRAVFQAKKRVLEPFGLVEEGAKTAPGKKRPVEQSPQEPDSSSGIGKTGQQPAKKRLNFGQTGDSESVPDPQPLGEPPATPAAVGPTTMASGGGAPMADNNEGADGVGNASGNWHCDSTWLGDRVITTSTRTWALPTYNNHLYKQISSASTGASNDNHYFGYSTPWGYFDFNRFHCHFSPRDWQRLINNNWGFRPKRLNFKLFNIQVKEVTTNDGVTTIANNLTSTVQVFSDSEYQLPYVLGSAHQGCLPPFPADVFMIPQYGYLTLNNGSQAVGRSSFYCLEYFPSQMLRTGNNFTFSYTFEDVPFHSSYAHSQSLDRLMNPLIDQYLYFLNRTQNQSGSAQNKDLLFSRGSPAGMSVQPKNWLPGPCYRQQRVSKTKTDNNNSNFTWTGASKYNLNGRESIINPGTAMASHKDDKDKFFPMSGVMIFGKESAGASNTALDNVMITDEEEIKATNPVATERFGTVAVNLQSSSTDPATGDVHVMGALPGMVWQDRDVYLQGPIWAKIPHTDGHFHPSPLMGGFGLKHPPPQILIKNTPVPANPPAEFSATKFASFITQYSTGQVSVEIEWELQKENSKRWNPEVQYTSNYAKSANVDFTVDNNGLYTEPRPIGTRYLTRPL

SEQ ID NO: 1258 - protein, 747 aa, Artificial Sequence
  source: /note="Description of Artificial Sequence: Synthetic polypeptide"
MAADGYLPDWLEDTLSEGIRQWWKLKPGPPPPKPAERHKDDSRGLVLPGYKYLGPFNGLDKGEPVNEADAAALEHDKAYDRQLDSGDNPYLKYNHADAEFQERLKEDTSFGGNLGRAVFQAKKRVLEPLGLVEEPVKTAPGKKRPVEHSPVEPDSSSGTGKAGQQPARKRLNFGQTGDADSVPDPQPLGQPPAAPSGLGTNTMATGSGAPMADNNEGADGVGNSSGNWHCDSTWMGDRVITTSTRTWALPTYNNHLYKQISSQSGASNDNHYFGYSTPWGYFDFNRFHCHFSPRDWQRLINNNWGFRPKRLNFKLFNIQVKEVTQNDGTTTIANNLTSTVQVFTDSEYQLPYVLGSAHQGCLPPFPADVFMVPQYGYLTLNNGSQAVGRSSFYCLEYFPSQMLRTGNNFTFSYTFEDVPFHSSYAHSQSLDRLMNPLIDQYLYYLSRTNTPSGTTTQSRLQFSQAGASDIRDQSRNWLPGPCYRQQRVSKTSADNNNSEYSWTGATKYHLNGRDSLVNPGPAMASHKDDEEKFFPQSGVLIFGKQGSEKTNVDIEKVMITDEEEIRTTNPVATEQYGSVSTNLQRGNAAAGSTPPPMAARQAATADVNTQGVLPGMVWQDRDVYLQGPIWAKIPHTDGHFHPSPLMGGFGLKHPPPQILIKNTPVPANPSTTFSAAKFASFITQYSTGQVSVEIEWELQKENSKRWNPEIQYTSNYNKSVNVDFTVDTNGVYSEPRPIGTRYLTRNL

SEQ ID NO: 1259 - protein, 747 aa, Artificial Sequence
  source: /note="Description of Artificial Sequence: Synthetic polypeptide"
MAADGYLPDWLEDTLSEGIRQWWKLKPGPPPPKPAERHKDDSRGLVLPGYKYLGPFNGLDKGEPVNEADAAALEHDKAYDRQLDSGDNPYLKYNHADAEFQERLKEDTSFGGNLGRAVFQAKKRVLEPLGLVEEPVKTAPGKKRPVEHSPVEPDSSSGTGKAGQQPARKRLNFGQTGDADSVPDPQPLGQPPAAPSGLGTNTMATGSGAPMADNNEGADGVGNSSGNWHCDSTWMGDRVITTSTRTWALPTYNNHLYKQISSQSGASNDNHYFGYSTPWGYFDFNRFHCHFSPRDWQRLINNNWGFRPKRLNFKLFNIQVKEVTQNDGTTTIANNLTSTVQVFTDSEYQLPYVLGSAHQGCLPPFPADVFMVPQYGYLTLNNGSQAVGRSSFYCLEYFPSQMLRTGNNFTFSYTFEDVPFHSSYAHSQSLDRLMNPLIDQYLYYLSRTNTPSGTTTQSRLQFSQAGASDIRDQSRNWLPGPCYRQQRVSKTSADNNNSEYSWTGATKYHLNGRDSLVNPGPAMASHKDDEEKFFPQSGVLIFGKQGSEKTNVDIEKVMITDEEEIRTTNPVATEQYGSVSTNLQRGNAAAGETRAPLAARQAATADVNTQGVLPGMVWQDRDVYLQGPIWAKIPHTDGHFHPSPLMGGFGLKHPPPQILIKNTPVPANPSTTFSAAKFASFITQYSTGQVSVEIEWELQKENSKRWNPEIQYTSNYNKSVNVDFTVDTNGVYSEPRPIGTRYLTRNL

SEQ ID NO: 1260 - protein, 7 aa, Artificial Sequence
  source: /note="Description of Artificial Sequence: Synthetic peptide"
TLAVPFK

SEQ ID NO: 1261 - protein, 7 aa, Artificial Sequence
  source: /note="Description of Artificial Sequence: Synthetic peptide"
KFPVALT

SEQ ID NO: 1262 - protein, 6 aa, Artificial Sequence
  source: /note="Description of Artificial Sequence: Synthetic peptide"
LAVPFK

SEQ ID NO: 1263 - protein, 5 aa, Artificial Sequence
  source: /note="Description of Artificial Sequence: Synthetic peptide"
AVPFK

SEQ ID NO: 1264 - protein, 4 aa, Artificial Sequence
  source: /note="Description of Artificial Sequence: Synthetic peptide"
VPFK

SEQ ID NO: 1265 - protein, 6 aa, Artificial Sequence
  source: /note="Description of Artificial Sequence: Synthetic peptide"
TLAVPF

SEQ ID NO: 1266 - protein, 5 aa, Artificial Sequence
  source: /note="Description of Artificial Sequence: Synthetic peptide"
TLAVP

SEQ ID NO: 1267 - protein, 4 aa, Artificial Sequence
  source: /note="Description of Artificial Sequence: Synthetic peptide"
TLAV

SEQ ID NO: 1268 - protein, 7 aa, Artificial Sequence
  source: /note="Description of Artificial Sequence: Synthetic peptide"
SVSKPFL

SEQ ID NO: 1269 - protein, 7 aa, Artificial Sequence
  source: /note="Description of Artificial Sequence: Synthetic peptide"
FTLTTPK

SEQ ID NO: 1270 - protein, 7 aa, Artificial Sequence
  source: /note="Description of Artificial Sequence: Synthetic peptide"
MNATKNV

SEQ ID NO: 1271 - protein, 7 aa, Artificial Sequence
  source: /note="Description of Artificial Sequence: Synthetic peptide"
QSSQTPR

SEQ ID NO: 1272 - protein, 7 aa, Artificial Sequence
  source: /note="Description of Artificial Sequence: Synthetic peptide"
ILGTGTS

SEQ ID NO: 1273 - protein, 7 aa, Artificial Sequence
  source: /note="Description of Artificial Sequence: Synthetic peptide"
TRTNPEA

SEQ ID NO: 1274 - protein, 7 aa, Artificial Sequence
  source: /note="Description of Artificial Sequence: Synthetic peptide"
NGGTSSS

SEQ ID NO: 1275 - protein, 7 aa, Artificial Sequence
  source: /note="Description of Artificial Sequence: Synthetic peptide"
YTLSQGW

SEQ ID NO: 1276 - DNA, 21 bp, Artificial Sequence
  source: /note="Description of Artificial Sequence: Synthetic oligonucleotide"
aagtttcctgtggcgttgact

SEQ ID NO: 1277 - DNA, 21 bp, Artificial Sequence
  source: /note="Description of Artificial Sequence: Synthetic oligonucleotide"
actttggcggtgccttttaag

SEQ ID NO: 1278 - DNA, 21 bp, Artificial Sequence
  source: /note="Description of Artificial Sequence: Synthetic oligonucleotide"
agtgtgagtaagccttttttg

SEQ ID NO: 1279 - DNA, 21 bp, Artificial Sequence
  source: /note="Description of Artificial Sequence: Synthetic oligonucleotide"
tttacgttgacgacgcctaag

SEQ ID NO: 1280 - DNA, 21 bp, Artificial Sequence
  source: /note="Description of Artificial Sequence: Synthetic oligonucleotide"
atgaatgctacgaagaatgtg

SEQ ID NO: 1281 - DNA, 21 bp, Artificial Sequence
  source: /note="Description of Artificial Sequence: Synthetic oligonucleotide"
cagtcgtcgcagacgcctagg

SEQ ID NO: 1282 - DNA, 21 bp, Artificial Sequence
  source: /note="Description of Artificial Sequence: Synthetic oligonucleotide"
attctggggactggtacttcg

SEQ ID NO: 1283 - DNA, 21 bp, Artificial Sequence
  source: /note="Description of Artificial Sequence: Synthetic oligonucleotide"
acgcggactaatcctgaggct

SEQ ID NO: 1284 - DNA, 21 bp, Artificial Sequence
  source: /note="Description of Artificial Sequence: Synthetic oligonucleotide"
aatggggggactagtagttct

SEQ ID NO: 1285 - DNA, 21 bp, Artificial Sequence
  source: /note="Description of Artificial Sequence: Synthetic oligonucleotide"
tatactttgtcgcagggttgg

SEQ ID NO: 1286 - protein, 11 aa, Artificial Sequence
  source: /note="Description of Artificial Sequence: Synthetic peptide"
AQTLAVPFKAQ

SEQ ID NO: 1287 - protein, 11 aa, Artificial Sequence
  source: /note="Description of Artificial Sequence: Synthetic peptide"
AQSVSKPFLAQ

SEQ ID NO: 1288 - protein, 11 aa, Artificial Sequence
  source: /note="Description of Artificial Sequence: Synthetic peptide"
AQFTLTTPKAQ

SEQ ID NO: 1289 - protein, 11 aa, Artificial Sequence
  source: /note="Description of Artificial Sequence: Synthetic peptide"
DGTLAVPFKAQ

SEQ ID NO: 1290 - protein, 11 aa, Artificial Sequence
  source: /note="Description of Artificial Sequence: Synthetic peptide"
ESTLAVPFKAQ

SEQ ID NO: 1291 - protein, 11 aa, Artificial Sequence
  source: /note="Description of Artificial Sequence: Synthetic peptide"
GGTLAVPFKAQ

SEQ ID NO: 1292 - protein, 11 aa, Artificial Sequence
  source: /note="Description of Artificial Sequence: Synthetic peptide"
AQTLATPFKAQ

SEQ ID NO: 1293 - protein, 11 aa, Artificial Sequence
  source: /note="Description of Artificial Sequence: Synthetic peptide"
ATTLATPFKAQ

SEQ ID NO: 1294 - protein, 11 aa, Artificial Sequence
  source: /note="Description of Artificial Sequence: Synthetic peptide"
DGTLATPFKAQ

SEQ ID NO: 1295 - protein, 11 aa, Artificial Sequence
  source: /note="Description of Artificial Sequence: Synthetic peptide"
GGTLATPFKAQ

SEQ ID NO: 1296 - protein, 11 aa, Artificial Sequence
  source: /note="Description of Artificial Sequence: Synthetic peptide"
SGSLAVPFKAQ

SEQ ID NO: 1297 - protein, 11 aa, Artificial Sequence
  source: /note="Description of Artificial Sequence: Synthetic peptide"
AQTLAQPFKAQ

SEQ ID NO: 1298 - protein, 11 aa, Artificial Sequence
  source: /note="Description of Artificial Sequence: Synthetic peptide"
AQTLQQPFKAQ

SEQ ID NO: 1299 - protein, 11 aa, Artificial Sequence
  source: /note="Description of Artificial Sequence: Synthetic peptide"
AQTLSNPFKAQ

SEQ ID NO: 1300 - protein, 11 aa, Artificial Sequence
  source: /note="Description of Artificial Sequence: Synthetic peptide"
AQTLAVPFSNP

SEQ ID NO: 1301 - protein, 11 aa, Artificial Sequence
  source: /note="Description of Artificial Sequence: Synthetic peptide"
QGTLAVPFKAQ

SEQ ID NO: 1302 - protein, 11 aa, Artificial Sequence
  source: /note="Description of Artificial Sequence: Synthetic peptide"
NQTLAVPFKAQ

SEQ ID NO: 1303 - protein, 11 aa, Artificial Sequence
  source: /note="Description of Artificial Sequence: Synthetic peptide"
EGSLAVPFKAQ

SEQ ID NO: 1304 - protein, 11 aa, Artificial Sequence
  source: /note="Description of Artificial Sequence: Synthetic peptide"
SGNLAVPFKAQ

SEQ ID NO: 1305 - protein, 11 aa, Artificial Sequence
  source: /note="Description of Artificial Sequence: Synthetic peptide"
EGTLAVPFKAQ

SEQ ID NO: 1306 - protein, 11 aa, Artificial Sequence
  source: /note="Description of Artificial Sequence: Synthetic peptide"
DSTLAVPFKAQ

SEQ ID NO: 1307 - protein, 11 aa, Artificial Sequence
  source: /note="Description of Artificial Sequence: Synthetic peptide"
AVTLAVPFKAQ

SEQ ID NO: 1308 - protein, 11 aa, Artificial Sequence
  source: /note="Description of Artificial Sequence: Synthetic peptide"
AQTLSTPFKAQ

SEQ ID NO: 1309 - protein, 11 aa, Artificial Sequence
  source: /note="Description of Artificial Sequence: Synthetic peptide"
AQTLPQPFKAQ

SEQ ID NO: 1310 - protein, 11 aa, Artificial Sequence
  source: /note="Description of Artificial Sequence: Synthetic peptide"
AQTLSQPFKAQ

SEQ ID NO: 1311 - protein, 11 aa, Artificial Sequence
  source: /note="Description of Artificial Sequence: Synthetic peptide"
AQTLQLPFKAQ

SEQ ID NO: 1312 - protein, 11 aa, Artificial Sequence
  source: /note="Description of Artificial Sequence: Synthetic peptide"
AQTLTMPFKAQ

SEQ ID NO: 1313 - protein, 11 aa, Artificial Sequence
  source: /note="Description of Artificial Sequence: Synthetic peptide"
AQTLTTPFKAQ

SEQ ID NO: 1314 - protein, 11 aa, Artificial Sequence
  source: /note="Description of Artificial Sequence: Synthetic peptide"
AQYTLSQGWAQ

SEQ ID NO: 1315 - protein, 11 aa, Artificial Sequence
  source: /note="Description of Artificial Sequence: Synthetic peptide"
AQMNATKNVAQ

SEQ ID NO: 1316 - protein, 11 aa, Artificial Sequence
  source: /note="Description of Artificial Sequence: Synthetic peptide"
AQVSGGHHSAQ

SEQ ID NO: 1317 - protein, 11 aa, Artificial Sequence
  source: /note="Description of Artificial Sequence: Synthetic peptide"
AQTLTAPFKAQ

SEQ ID NO: 1318 - protein, 11 aa, Artificial Sequence
  source: /note="Description of Artificial Sequence: Synthetic peptide"
AQTLSKPFKAQ

SEQ ID NO: 1319 - protein, 7 aa, Artificial Sequence
  source: /note="Description of Artificial Sequence: Synthetic peptide"
QAVRTSL

SEQ ID NO: 1320 - protein, 7 aa, Artificial Sequence
  source: /note="Description of Artificial Sequence: Synthetic peptide"
LAKERLS

SEQ ID NO: 1321 - protein, 7 aa, Artificial Sequence
  source: /note="Description of Artificial Sequence: Synthetic peptide"
MNSTKNV

SEQ ID NO: 1322 - protein, 7 aa, Artificial Sequence
  source: /note="Description of Artificial Sequence: Synthetic peptide"
VSGGHHS

SEQ ID NO: 1323 - protein, 14 aa, Artificial Sequence
  source: /note="Description of Artificial Sequence: Synthetic peptide"
SAQTLAVPFKAQAQ

SEQ ID NO: 1324 - protein, 14 aa, Artificial Sequence
  source: /note="Description of Artificial Sequence: Synthetic peptide"
  MOD_RES (2)..(4): Any amino acid
SXXXLAVPFKAQAQ

SEQ ID NO: 1325 - protein, 14 aa, Artificial Sequence
  source: /note="Description of Artificial Sequence: Synthetic peptide"
  MOD_RES (4)..(6): Any amino acid
SAQXXXVPFKAQAQ

SEQ ID NO: 1326 - protein, 14 aa, Artificial Sequence
  source: /note="Description of Artificial Sequence: Synthetic peptide"
  MOD_RES (6)..(8): Any amino acid
SAQTLXXXFKAQAQ

SEQ ID NO: 1327 - protein, 14 aa, Artificial Sequence
  source: /note="Description of Artificial Sequence: Synthetic peptide"
  MOD_RES (8)..(10): Any amino acid
SAQTLAVXXXAQAQ

SEQ ID NO: 1328 - protein, 14 aa, Artificial Sequence
  source: /note="Description of Artificial Sequence: Synthetic peptide"
  MOD_RES (10)..(12): Any amino acid
SAQTLAVPFXXXAQ

SEQ ID NO: 1329 - protein, 7 aa, Artificial Sequence
  source: /note="Description of Artificial Sequence: Synthetic peptide"
TNHQSAQ

SEQ ID NO: 1330 - protein, 7 aa, Artificial Sequence
  source: /note="Description of Artificial Sequence: Synthetic peptide"
AQAQTGW

SEQ ID NO: 1331 - protein, 9 aa, Artificial Sequence
  source: /note="Description of Artificial Sequence: Synthetic peptide"
DGTLATPFK

SEQ ID NO: 1332 - protein, 11 aa, Artificial Sequence
  source: /note="Description of Artificial Sequence: Synthetic peptide"
  MOD_RES (10)..(11): Any amino acid
DGTLATPFKXX

SEQ ID NO: 1333 - protein, 8 aa, Artificial Sequence
  source: /note="Description of Artificial Sequence: Synthetic peptide"
LAVPFKAQ

SEQ ID NO: 1334 - protein, 6 aa, Artificial Sequence
  source: /note="Description of Artificial Sequence: Synthetic peptide"
VPFKAQ

SEQ ID NO: 1335 - protein, 4 aa, Artificial Sequence
  source: /note="Description of Artificial Sequence: Synthetic peptide"
FKAQ

SEQ ID NO: 1336 - protein, 6 aa, Artificial Sequence
  source: /note="Description of Artificial Sequence: Synthetic peptide"
AQTLAV

SEQ ID NO: 1337 - protein, 8 aa, Artificial Sequence
  source: /note="Description of Artificial Sequence: Synthetic peptide"
AQTLAVPF

SEQ ID NO: 1338 - protein, 4 aa, Artificial Sequence
  source: /note="Description of Artificial Sequence: Synthetic peptide"
QAVR

SEQ ID NO: 1339 - protein, 4 aa, Artificial Sequence
  source: /note="Description of Artificial Sequence: Synthetic peptide"
AVRT

SEQ ID NO: 1340 - protein, 4 aa, Artificial Sequence
  source: /note="Description of Artificial Sequence: Synthetic peptide"
VRTS

SEQ ID NO: 1341 - protein, 4 aa, Artificial Sequence
  source: /note="Description of Artificial Sequence: Synthetic peptide"
RTSL

SEQ ID NO: 1342 - protein, 5 aa, Artificial Sequence
  source: /note="Description of Artificial Sequence: Synthetic peptide"
QAVRT

SEQ ID NO: 1343 - protein, 5 aa, Artificial Sequence
  source: /note="Description of Artificial Sequence: Synthetic peptide"
AVRTS

SEQ ID NO: 1344 - protein, 5 aa, Artificial Sequence
  source: /note="Description of Artificial Sequence: Synthetic peptide"
VRTSL

SEQ ID NO: 1345 - protein, 6 aa, Artificial Sequence
  source: /note="Description of Artificial Sequence: Synthetic peptide"
QAVRTS

SEQ ID NO: 1346 - protein, 6 aa, Artificial Sequence
  source: /note="Description of Artificial Sequence: Synthetic peptide"
AVRTSL

SEQ ID NO: 1347 - DNA, 33 bp, Artificial Sequence
  source: /note="Description of Artificial Sequence: Synthetic oligonucleotide"
gatgggactttggcggtgccttttaaggcacag

SEQ ID NO: 1348 - DNA, 33 bp, Artificial Sequence
  source: /note="Description of Artificial Sequence: Synthetic oligonucleotide"
gatgggacgttggcggtgccttttaaggcacag

SEQ ID NO: 1349 - DNA, 21 bp, Artificial Sequence
  source: /note="Description of Artificial Sequence: Synthetic oligonucleotide"
caggcggttaggacgtctttg

SEQ ID NO: 1350 - DNA, 27 bp, Artificial Sequence
  source: /note="Description of Artificial Sequence: Synthetic oligonucleotide"
caggtcttcacggactcagactatcag

SEQ ID NO: 1351 - DNA, 32 bp, Artificial Sequence
  source: /note="Description of Artificial Sequence: Synthetic oligonucleotide"
caagtaaaacctctacaaatgtggtaaaatcg

SEQ ID NO: 1352 - DNA, 36 bp, Artificial Sequence
  source: /note="Description of Artificial Sequence: Synthetic oligonucleotide"
actcatcgaccaatacttgtactatctctctagaac

SEQ ID NO: 1353 - DNA, 26 bp, Artificial Sequence
  source: /note="Description of Artificial Sequence: Synthetic oligonucleotide"
ggaagtattccttggttttgaaccca

SEQ ID NO: 1354 - DNA, 23 bp, Artificial Sequence
  source: /note="Description of Artificial Sequence: Synthetic oligonucleotide"
ggtcgcggttcttgtttgtggat

SEQ ID NO: 1355 - DNA, 24 bp, Artificial Sequence
  source: /note="Description of Artificial Sequence: Synthetic oligonucleotide"
cgaccttgaagcgcatgaactcct

SEQ ID NO: 1356 - DNA, 83 bp, Artificial Sequence
  source: /note="Description of Artificial Sequence: Synthetic oligonucleotide"
  modified_base (42)..(43): a, c, g, or t
  modified_base (45)..(46): a, c, g, or t
  modified_base (48)..(49): a, c, g, or t
  modified_base (51)..(52): a, c, g, or t
  modified_base (54)..(55): a, c, g, or t
  modified_base (57)..(58): a, c, g, or t
  modified_base (60)..(61): a, c, g, or t
gtattccttggttttgaacccaaccggtctgcgcctgtgcmnnmnnmnnmnnmnnmnnmnnttgggcactctggtggtttgtc

SEQ ID NO: 1357 - DNA, 64 bp, Artificial Sequence
  source: /note="Description of Artificial Sequence: Synthetic oligonucleotide"
  modified_base (36)..(37): a, c, g, or t
  modified_base (39)..(40): a, c, g, or t
  modified_base (42)..(43): a, c, g, or t
gtattccttggttttgaacccaaccggtctgcgcmnnmnnmnnaaaaggcaccgccaaagtttg

SEQ ID NO: 1358 - DNA, 70 bp, Artificial Sequence
  source: /note="Description of Artificial Sequence: Synthetic oligonucleotide"
  modified_base (42)..(43): a, c, g, or t
  modified_base (45)..(46): a, c, g, or t
  modified_base (48)..(49): a, c, g, or t
gtattccttggttttgaacccaaccggtctgcgcctgtgcmnnmnnmnncaccgccaaagtttgggcact

SEQ ID NO: 1359 - DNA, 77 bp, Artificial Sequence
  source: /note="Description of Artificial Sequence: Synthetic oligonucleotide"
  modified_base (48)..(49): a, c, g, or t
  modified_base (51)..(52): a, c, g, or t
  modified_base (54)..(55): a, c, g, or t
gtattccttggttttgaacccaaccggtctgcgcctgtgccttaaamnnmnnmnncaaagtttgggcactctggtgg

SEQ ID NO: 1360 - DNA, 83 bp, Artificial Sequence
  source: /note="Description of Artificial Sequence: Synthetic oligonucleotide"
  modified_base (54)..(55): a, c, g, or t
  modified_base (57)..(58): a, c, g, or t
  modified_base (60)..(61): a, c, g, or t
gtattccttggttttgaacccaaccggtctgcgcctgtgccttaaaaggcacmnnmnnmnnttgggcactctggtggtttgtg

SEQ ID NO: 1361 - DNA, 21 bp, Artificial Sequence
  source: /note="Description of Artificial Sequence: Synthetic oligonucleotide"
cttgcgaaggagcggctttcg

SEQ ID NO: 1362 - protein, 10 aa, Artificial Sequence
  source: /note="Description of Artificial Sequence: Synthetic peptide"
VNLTWSRASG

SEQ ID NO: 1363 - protein, 14 aa, Artificial Sequence
  source: /note="Description of Artificial Sequence: Synthetic peptide"
EFCINHRGYWVCGD

SEQ ID NO: 1364 - protein, 11 aa, Artificial Sequence
  source: /note="Description of Artificial Sequence: Synthetic peptide"
EDGQVMDVDLS

SEQ ID NO: 1365 - protein, 9 aa, Artificial Sequence
  source: /note="Description of Artificial Sequence: Synthetic peptide"
EKQRNGTLT

SEQ ID NO: 1366 - protein, 17 aa, Artificial Sequence
  source: /note="Description of Artificial Sequence: Synthetic peptide"
TYQCRVTHPHLPRALMR

SEQ ID NO: 1367 - protein, 14 aa, Artificial Sequence
  source: /note="Description of Artificial Sequence: Synthetic peptide"
RHSTTQPRKTKGSG

SEQ ID NO: 1368 - protein, 13 aa, Artificial Sequence
  source: /note="Description of Artificial Sequence: Synthetic peptide"
DSNPRGVSAYLSR

SEQ ID NO: 1369 - protein, 12 aa, Artificial Sequence
  source: /note="Description of Artificial Sequence: Synthetic peptide"
TITCLWDLAPSK

SEQ ID NO: 1370 - protein, 10 aa, Artificial Sequence
  source: /note="Description of Artificial Sequence: Synthetic peptide"
KTKGSGFFVF

SEQ ID NO: 1371 - protein, 12 aa, Artificial Sequence
  source: /note="Description of Artificial Sequence: Synthetic peptide"
THPHLPRALMRS

SEQ ID NO: 1372 - protein, 23 aa, Artificial Sequence
  source: /note="Description of Artificial Sequence: Synthetic peptide"
GETYQCRVTHPHLPRALMRSTTK

SEQ ID NO: 1373 - protein, 8 aa, Artificial Sequence
  source: /note="Description of Artificial Sequence: Synthetic peptide"
LPRALMRS

SEQ ID NO: 1374 - protein, 8 aa, Artificial Sequence
  source: /note="Description of Artificial Sequence: Synthetic peptide"
INHRGYWV

SEQ ID NO: 1375 - protein, 12 aa, Artificial Sequence
  source: /note="Description of Artificial Sequence: Synthetic peptide"
CDAGSVRTNAPD

SEQ ID NO: 1376 - protein, 17 aa, Artificial Sequence
  source: /note="Description of Artificial Sequence: Synthetic peptide"
AKAVSNLTESRSESLQS

SEQ ID NO: 1377 - protein, 13 aa, Artificial Sequence
  source: /note="Description of Artificial Sequence: Synthetic peptide"
SLTGDEFKKVLET

SEQ ID NO: 1378 - protein, 11 aa, Artificial Sequence
  source: /note="Description of Artificial Sequence: Synthetic peptide"
REAVAYRFEED

SEQ ID NO: 1379 - protein, 10 aa, Artificial Sequence
  source: /note="Description of Artificial Sequence: Synthetic peptide"
INPEIITLDG

SEQ ID NO: 1380 - protein, 15 aa, Artificial Sequence
  source: /note="Description of Artificial Sequence: Synthetic peptide"
DISVTGAPVITATYL

SEQ ID NO: 1381 - protein, 12 aa, Artificial Sequence
  source: /note="Description of Artificial Sequence: Synthetic peptide"
DISVTGAPVITA

SEQ ID NO: 1382 - protein, 17 aa, Artificial Sequence
  source: /note="Description of Artificial Sequence: Synthetic peptide"
PKTVSNLTESSSESVQS

SEQ ID NO: 1383 - protein, 13 aa, Artificial Sequence
  source: /note="Description of Artificial Sequence: Synthetic peptide"
SLMGDEFKAVLET

SEQ ID NO: 1384 - protein, 11 aa, Artificial Sequence
  source: /note="Description of Artificial Sequence: Synthetic peptide"
QHSVAYTFEED

SEQ ID NO: 1385 - protein, 10 aa, Artificial Sequence
  source: /note="Description of Artificial Sequence: Synthetic peptide"
INPEIITRDG

SEQ ID NO: 1386 - protein, 15 aa, Artificial Sequence
  source: /note="Description of Artificial Sequence: Synthetic peptide"
DISLTGDPVITASYL

SEQ ID NO: 1387 - protein, 12 aa, Artificial Sequence
  source: /note="Description of Artificial Sequence: Synthetic peptide"
DISLTGDPVITA

SEQ ID NO: 1388 - protein, 11 aa, Artificial Sequence
  source: /note="Description of Artificial Sequence: Synthetic peptide"
DQSIDFEIDSA

SEQ ID NO: 1389 - protein, 20 aa, Artificial Sequence
  source: /note="Description of Artificial Sequence: Synthetic peptide"
KNVSEDLPLPTFSPTLLGDS

SEQ ID NO: 1390 - protein, 11 aa, Artificial Sequence
  source: /note="Description of Artificial Sequence: Synthetic peptide"
KNVSEDLPLPT

SEQ ID NO: 1391 - protein, 12 aa, Artificial Sequence
  source: /note="Description of Artificial Sequence: Synthetic peptide"
CDSGRVRTDAPD

SEQ ID NO: 1392 - protein, 14 aa, Artificial Sequence
  source: /note="Description of Artificial Sequence: Synthetic peptide"
FPEHLLVDFLQSLS

SEQ ID NO: 1393 - protein, 9 aa, Artificial Sequence
  source: /note="Description of Artificial Sequence: Synthetic peptide"
DAEFRHDSG

SEQ ID NO: 1394 - protein, 16 aa, Artificial Sequence
  source: /note="Description of Artificial Sequence: Synthetic peptide"
HYAAAQWDFGNTMCQL

SEQ ID NO: 1395 - protein, 13 aa, Artificial Sequence
  source: /note="Description of Artificial Sequence: Synthetic peptide"
YAAQWDFGNTMCQ

SEQ ID NO: 1396 - protein, 10 aa, Artificial Sequence
  source: /note="Description of Artificial Sequence: Synthetic peptide"
RSQKEGLHYT

SEQ ID NO: 1397 - protein, 19 aa, Artificial Sequence
  source: /note="Description of Artificial Sequence: Synthetic peptide"
SSRTPSDKPVAHWANPQAE

SEQ ID NO: 1398 - protein, 15 aa, Artificial Sequence
  source: /note="Description of Artificial Sequence: Synthetic peptide"
SRTPSDKPVAHWANP

SEQ ID NO: 1399 - protein, 9 aa, Artificial Sequence
  source: /note="Description of Artificial Sequence: Synthetic peptide"
SSRTPSDKP

SEQ ID NO: 1400 - protein, 14 aa, Artificial Sequence
  source: /note="Description of Artificial Sequence: Synthetic peptide"
NADGNVDYHMNSVP

SEQ ID NO: 1401 - protein, 11 aa, Artificial Sequence
  source: /note="Description of Artificial Sequence: Synthetic peptide"
DGNVDYHMNSV

SEQ ID NO: 1402 - protein, 16 aa, Artificial Sequence
  source: /note="Description of Artificial Sequence: Synthetic peptide"
RSFKEFLQSSLRALRQ

SEQ ID NO: 1403 - protein, 11 aa, Artificial Sequence
  source: /note="Description of Artificial Sequence: Synthetic peptide"
FKEFLQSSLRA

SEQ ID NO: 1404 - protein, 10 aa, Artificial Sequence
  source: /note="Description of Artificial Sequence: Synthetic peptide"
QMWAPQWGPD

SEQ ID NO: 1405 - protein, 6 aa, Artificial Sequence
  source: /note="Description of Artificial Sequence: Synthetic peptide"
RGNRQA

SEQ ID NO: 1406 - protein, 6 aa, Artificial Sequence
  source: /note="Description of Artificial Sequence: Synthetic peptide"
SSSTDP

SEQ ID NO: 1407 - protein, 6 aa, Artificial Sequence
  source: /note="Description of Artificial Sequence: Synthetic peptide"
SSNTAP

SEQ ID NO: 1408 - protein, 6 aa, Artificial Sequence
  source: /note="Description of Artificial Sequence: Synthetic peptide"
SNSNLP

SEQ ID NO: 1409 - protein, 6 aa, Artificial Sequence
  source: /note="Description of Artificial Sequence: Synthetic peptide"
SSTTAP

SEQ ID NO: 1410 - protein, 6 aa, Artificial Sequence
  source: /note="Description of Artificial Sequence: Synthetic peptide"
AANTAA

SEQ ID NO: 1411 - protein, 6 aa, Artificial Sequence
  source: /note="Description of Artificial Sequence: Synthetic peptide"
QQNTAP

SEQ ID NO: 1412 - protein, 6 aa, Artificial Sequence
  source: /note="Description of Artificial Sequence: Synthetic peptide"
SAQAQA

SEQ ID NO: 1413 - protein, 6 aa, Artificial Sequence
  source: /note="Description of Artificial Sequence: Synthetic peptide"
QANTGP

SEQ ID NO: 1414 - protein, 6 aa, Artificial Sequence
  source: /note="Description of Artificial Sequence: Synthetic peptide"
NATTAP

SEQ ID NO: 1415 - protein, 6 aa, Artificial Sequence
  source: /note="Description of Artificial Sequence: Synthetic peptide"
SSTAGP

SEQ ID NO: 1416 - protein, 6 aa, Artificial Sequence
  source: /note="Description of Artificial Sequence: Synthetic peptide"
QQNTAA

SEQ ID NO: 1417 - protein, 6 aa, Artificial Sequence
  source: /note="Description of Artificial Sequence: Synthetic peptide"
PSTAGP

SEQ ID NO: 1418 - protein, 6 aa, Artificial Sequence
  source: /note="Description of Artificial Sequence: Synthetic peptide"
NQNTAP

SEQ ID NO: 1419 - protein, 6 aa, Artificial Sequence
  source: /note="Description of Artificial Sequence: Synthetic peptide"
QAANAP

SEQ ID NO: 1420 - protein, 6 aa, Artificial Sequence
  source: /note="Description of Artificial Sequence: Synthetic peptide"
SIVGLP

SEQ ID NO: 1421 - protein, 6 aa, Artificial Sequence
  source: /note="Description of Artificial Sequence: Synthetic peptide"
AASTAA

SEQ ID NO: 1422 - protein, 6 aa, Artificial Sequence
  source: /note="Description of Artificial Sequence: Synthetic peptide"
SQNTTA

SEQ ID NO: 1423 - protein, 6 aa, Artificial Sequence
  source: /note="Description of Artificial Sequence: Synthetic peptide"
QQDTAP

SEQ ID NO: 1424 - protein, 6 aa, Artificial Sequence
  source: /note="Description of Artificial Sequence: Synthetic peptide"
QTNTGP

SEQ ID NO: 1425 - protein, 6 aa, Artificial Sequence
  source: /note="Description of Artificial Sequence: Synthetic peptide"
QTNGAP

SEQ ID NO: 1426 - protein, 6 aa, Artificial Sequence
  source: /note="Description of Artificial Sequence: Synthetic peptide"
QQNAAP

SEQ ID NO: 1427 - protein, 6 aa, Artificial Sequence
  source: /note="Description of Artificial Sequence: Synthetic peptide"
AANTQA

SEQ ID NO: 1428 - protein, 6 aa, Artificial Sequence
  source: /note="Description of Artificial Sequence: Synthetic peptide"
NGRAHA

SEQ ID NO: 1429 - protein, 7 aa, Artificial Sequence
  source: /note="Description of Artificial Sequence: Synthetic peptide"
QPEHSST

SEQ ID NO: 1430 - protein, 7 aa, Artificial Sequence
  source: /note="Description of Artificial Sequence: Synthetic peptide"
VNTANST

SEQ ID NO: 1431 - protein, 7 aa, Artificial Sequence
  source: /note="Description of Artificial Sequence: Synthetic peptide"
HGPMQKS

SEQ ID NO: 1432 - protein, 7 aa, Artificial Sequence
  source: /note="Description of Artificial Sequence: Synthetic peptide"
PHKPPLA

SEQ ID NO: 1433 - protein, 7 aa, Artificial Sequence
  source: /note="Description of Artificial Sequence: Synthetic peptide"
IKNNEMW

SEQ ID NO: 1434 - protein, 7 aa, Artificial Sequence
  source: /note="Description of Artificial Sequence: Synthetic peptide"
RNLDTPM

SEQ ID NO: 1435 - protein, 7 aa, Artificial Sequence
  source: /note="Description of Artificial Sequence: Synthetic peptide"
VDSHRQS

SEQ ID NO: 1436 - protein, 7 aa, Artificial Sequence
  source: /note="Description of Artificial Sequence: Synthetic peptide"
YDSKTKT

SEQ ID NO: 1437 - protein, 7 aa, Artificial Sequence
  source: /note="Description of Artificial Sequence: Synthetic peptide"
SQLPHQK

SEQ ID NO: 1438 - protein, 7 aa, Artificial Sequence
  source: /note="Description of Artificial Sequence: Synthetic peptide"
STMQQNT

SEQ ID NO: 1439 - protein, 7 aa, Artificial Sequence
  source: /note="Description of Artificial Sequence: Synthetic peptide"
TERYMTQ

SEQ ID NO: 1440 - protein, 7 aa, Artificial Sequence
  source: /note="Description of Artificial Sequence: Synthetic peptide"
DASLSTS

SEQ ID NO: 1441 - protein, 7 aa, Artificial Sequence
  source: /note="Description of Artificial Sequence: Synthetic peptide"
DLPNKKT

SEQ ID NO: 1442 - protein, 7 aa, Artificial Sequence
  source: /note="Description of Artificial Sequence: Synthetic peptide"
DLTAARL

SEQ ID NO: 1443 - protein, 7 aa, Artificial Sequence
  source: /note="Description of Artificial Sequence: Synthetic peptide"
EPHQFNY

SEQ ID NO: 1444 - protein, 7 aa, Artificial Sequence
  source: /note="Description of Artificial Sequence: Synthetic peptide"
EPQSNHT

SEQ ID NO: 1445 - protein, 7 aa, Artificial Sequence
  source: /note="Description of Artificial Sequence: Synthetic peptide"
MSSWPSQ

SEQ ID NO: 1446 - protein, 7 aa, Artificial Sequence
  source: /note="Description of Artificial Sequence: Synthetic peptide"
NPKHNAT

SEQ ID NO: 1447 - protein, 7 aa, Artificial Sequence
  source: /note="Description of Artificial Sequence: Synthetic peptide"
PDGMRTT

SEQ ID NO: 1448 - protein, 7 aa, Artificial Sequence
  source: /note="Description of Artificial Sequence: Synthetic peptide"
PNNNKTT

SEQ ID NO: 1449 - protein, 7 aa, Artificial Sequence
  source: /note="Description of Artificial Sequence: Synthetic peptide"
QSTTHDS

SEQ ID NO: 1450 - protein, 7 aa, Artificial Sequence
  source: /note="Description of Artificial Sequence: Synthetic peptide"
TGSKQKQ

SEQ ID NO: 1451 - protein, 7 aa, Artificial Sequence
  source: /note="Description of Artificial Sequence: Synthetic peptide"
SLKHQAL

SEQ ID NO: 1452 - protein, 7 aa, Artificial Sequence
  source: /note="Description of Artificial Sequence: Synthetic peptide"
SPIDGEQ

SEQ ID NO: 1453 - protein, 8 aa, Artificial Sequence
  source: /note="Description of Artificial Sequence: Synthetic peptide"
WIFPWIQL

SEQ ID NO: 1454 - protein, 9 aa, Artificial Sequence
  source: /note="Description of Artificial Sequence: Synthetic peptide"
CDCRGDCFC

SEQ ID NO: 1455 - protein, 5 aa, Artificial Sequence
  source: /note="Description of Artificial Sequence: Synthetic peptide"
CNGRC

SEQ ID NO: 1456 - protein, 7 aa, Artificial Sequence
  source: /note="Description of Artificial Sequence: Synthetic peptide"
CPRECES

SEQ ID NO: 1457 - protein, 10 aa, Artificial Sequence
  source: /note="Description of Artificial Sequence: Synthetic peptide"
CTTHWGFTLC

SEQ ID NO: 1458 - protein, 9 aa, Artificial Sequence
  source: /note="Description of Artificial Sequence: Synthetic peptide"
CGRRAGGSC

SEQ ID NO: 1459 - protein, 9 aa, Artificial Sequence
  source: /note="Description of Artificial Sequence: Synthetic peptide"
CKGGRAKDC

SEQ ID NO: 1460 - protein, 9 aa, Artificial Sequence
  source: /note="Description of Artificial Sequence: Synthetic peptide"
CVPELGHEC

SEQ ID NO: 1461 - protein, 9 aa, Artificial Sequence
  source: /note="Description of Artificial Sequence: Synthetic peptide"
CRRETAWAK

SEQ ID NO: 1462 - protein, 14 aa, Artificial Sequence
  source: /note="Description of Artificial Sequence: Synthetic peptide"
VSWFSHRYSPFAVS

SEQ ID NO: 1463 - protein, 13 aa, Artificial Sequence
  source: /note="Description of Artificial Sequence: Synthetic peptide"
GYRDGYAGPILYN

SEQ ID NO: 1464 - protein, 7 aa, Artificial Sequence
  source: /note="Description of Artificial Sequence: Synthetic peptide"
  MOD_RES (1)..(3): Any amino acid
  MOD_RES (5)..(7): Any amino acid
XXXYXXX

SEQ ID NO: 1465 - protein, 4 aa, Artificial Sequence
  source: /note="Description of Artificial Sequence: Synthetic peptide"
  VARIANT (2)..(2): /replace="Met"
  SITE (1)..(4): /note="Variant residues given in the sequence have no preference with respect to those in the annotations for variant positions"
YENW

SEQ ID NO: 1466 - protein, 7 aa, Artificial Sequence
  source: /note="Description of Artificial Sequence: Synthetic peptide"
RPLPPLP

SEQ ID NO: 1467 - protein, 7 aa, Artificial Sequence
  source: /note="Description of Artificial Sequence: Synthetic peptide"
APPLPPR

SEQ ID NO: 1468 - protein, 12 aa, Artificial Sequence
  source: /note="Description of Artificial Sequence: Synthetic peptide"
DVFYPYPYASGS

SEQ ID NO: 1469 - protein, 6 aa, Artificial Sequence
  source: /note="Description of Artificial Sequence: Synthetic peptide"
MYWYPY

SEQ ID NO: 1470 - protein, 12 aa, Artificial Sequence
  source: /note="Description of Artificial Sequence: Synthetic peptide"
DITWDQLWDLMK

SEQ ID NO: 1471 - protein, 8 aa, Artificial Sequence
  source: /note="Description of Artificial Sequence: Synthetic peptide"
  VARIANT (5)..(5): /replace="Leu"
  SITE (1)..(8): /note="Variant residues given in the sequence have no preference with respect to those in the annotations for variant positions"
CWDDGWLC

SEQ ID NO: 1472 - protein, 14 aa, Artificial Sequence
  source: /note="Description of Artificial Sequence: Synthetic peptide"
EWCEYLGGYLRCYA

SEQ ID NO: 1473 - protein, 14 aa, Artificial Sequence
  source: /note="Description of Artificial Sequence: Synthetic peptide"
  MOD_RES (2)..(2): Any amino acid
  MOD_RES (4)..(5): Any amino acid
  MOD_RES (8)..(8): Any amino acid
  MOD_RES (11)..(11): Any amino acid
  MOD_RES (13)..(13): Any amino acid
YXCXXGPXTWXCXP

SEQ ID NO: 1474 - protein, 14 aa, Artificial Sequence
  source: /note="Description of Artificial Sequence: Synthetic peptide"
IEGPTLRQWLAARA

SEQ ID NO: 1475 - protein, 5 aa, Artificial Sequence
  source: /note="Description of Artificial Sequence: Synthetic peptide"
  MOD_RES (3)..(4): Any amino acid
  VARIANT (5)..(5): /replace="Trp" or "Phe" or "His"
  SITE (1)..(5): /note="Variant residues given in the sequence have no preference with respect to those in the annotations for variant positions"
LWXXY

SEQ ID NO: 1476 - protein, 7 aa, Artificial Sequence
  source: /note="Description of Artificial Sequence: Synthetic peptide"
  MOD_RES (1)..(1): Any amino acid
  MOD_RES (3)..(4): Any amino acid
XFXXYLW

SEQ ID NO: 1477 - protein, 13 aa, Artificial Sequence
  source: /note="Description of Artificial Sequence: Synthetic peptide"
SSIISHFRWGLCD

SEQ ID NO: 1478 - protein, 13 aa, Artificial Sequence
  source: /note="Description of Artificial Sequence: Synthetic peptide"
MSRPACPPNDKYE

SEQ ID NO: 1479 - protein, 8 aa, Artificial Sequence
  source: /note="Description of Artificial Sequence: Synthetic peptide"
CLRSGRGC

SEQ ID NO: 1480 - protein, 9 aa, Artificial Sequence
  source: /note="Description of Artificial Sequence: Synthetic peptide"
CHWMFSPWC

SEQ ID NO: 1481 - protein, 4 aa, Artificial Sequence
  source: /note="Description of Artificial Sequence: Synthetic peptide"
  MOD_RES (2)..(3): Any amino acid
WXXF

SEQ ID NO: 1482 - protein, 8 aa, Artificial Sequence
  source: /note="Description of Artificial Sequence: Synthetic peptide"
CSSRLDAC

SEQ ID NO: 1483 - protein, 7 aa, Artificial Sequence
  source: /note="Description of Artificial Sequence: Synthetic peptide"
CLPVASC

SEQ ID NO: 1484 - protein, 13 aa, Artificial Sequence
  source: /note="Description of Artificial Sequence: Synthetic peptide"
CGFECVRQCPERC

SEQ ID NO: 1485 - protein, 13 aa, Artificial Sequence
  source: /note="Description of Artificial Sequence: Synthetic peptide"
CVALCREACGEGC

SEQ ID NO: 1486 - protein, 9 aa, Artificial Sequence
  source: /note="Description of Artificial Sequence: Synthetic peptide"
SWCEPGWCR

SEQ ID NO: 1487 - protein, 7 aa, Artificial Sequence
  source: /note="Description of Artificial Sequence: Synthetic peptide"
YSGKWGW

SEQ ID NO: 1488 - protein, 7 aa, Artificial Sequence
  source: /note="Description of Artificial Sequence: Synthetic peptide"
GLSGGRS

SEQ ID NO: 1489 - protein, 7 aa, Artificial Sequence
  source: /note="Description of Artificial Sequence: Synthetic peptide"
LMLPRAD

SEQ ID NO: 1490 - protein, 9 aa, Artificial Sequence
  source: /note="Description of Artificial Sequence: Synthetic peptide"
CSCFRDVCC

SEQ ID NO: 1491 - protein, 9 aa, Artificial Sequence
  source: /note="Description of Artificial Sequence: Synthetic peptide"
CRDVVSVIC

SEQ ID NO: 1492 - protein, 6 aa, Artificial Sequence
  source: /note="Description of Artificial Sequence: Synthetic peptide"
MARSGL

SEQ ID NO: 1493 - protein, 6 aa, Artificial Sequence
  source: /note="Description of Artificial Sequence: Synthetic peptide"
MARAKE

SEQ ID NO: 1494 - protein, 6 aa, Artificial Sequence
  source: /note="Description of Artificial Sequence: Synthetic peptide"
MSRTMS

SEQ ID NO: 1495 - protein, 6 aa, Artificial Sequence
  source: /note="Description of Artificial Sequence: Synthetic peptide"
KCCYSL

SEQ ID NO: 1496 - protein, 14 aa, Artificial Sequence
  source: /note="Description of Artificial Sequence: Synthetic peptide"
MYWGDSHWLQYWYE

SEQ ID NO: 1497 - protein, 7 aa, Artificial Sequence
  source: /note="Description of Artificial Sequence: Synthetic peptide"
MQLPLAT

SEQ ID NO: 1498 - protein, 4 aa, Artificial Sequence
  source: /note="Description of Artificial Sequence: Synthetic peptide"
EWLS

SEQ ID NO: 1499 - protein, 4 aa, Artificial Sequence
  source: /note="Description of Artificial Sequence: Synthetic peptide"
SNEW

SEQ ID NO: 1500 - protein, 4 aa, Artificial Sequence
  source: /note="Description of Artificial Sequence: Synthetic peptide"
TNYL

SEQ ID NO: 1501 - protein, 12 aa, Artificial Sequence
  source: /note="Description of Artificial Sequence: Synthetic peptide"
WDLAWMFRLPVG

SEQ ID NO: 1502 - protein, 13 aa, Artificial Sequence
  source: /note="Description of Artificial Sequence: Synthetic peptide"
CTVALPGGYVRVC

SEQ ID NO: 1503 - protein, 13 aa, Artificial Sequence
  source: /note="Description of Artificial Sequence: Synthetic peptide"
CVAYCIEHHCWTC

SEQ ID NO: 1504 - protein, 12 aa, Artificial Sequence
  source: /note="Description of Artificial Sequence: Synthetic peptide"
CVFAHNYDYLVC

SEQ ID NO: 1505 - protein, 10 aa, Artificial Sequence
  source: /note="Description of Artificial Sequence: Synthetic peptide"
CVFTSNYAFC

SEQ ID NO: 1506 - protein, 7 aa, Artificial Sequence
  source: /note="Description of Artificial Sequence: Synthetic peptide"
VHSPNKK

SEQ ID NO: 1507 - protein, 7 aa, Artificial Sequence
  source: /note="Description of Artificial Sequence: Synthetic peptide"
CRGDGWC

SEQ ID NO: 1508 - protein, 6 aa, Artificial Sequence
  source: /note="Description of Artificial Sequence: Synthetic peptide"
  MOD_RES (1)..(1): Any amino acid
  MOD_RES (6)..(6): Any amino acid
XRGCDX

SEQ ID NO: 1509 - protein, 4 aa, Artificial Sequence
  source: /note="Description of Artificial Sequence: Synthetic peptide"
  MOD_RES (2)..(3): Any amino acid
  VARIANT (4)..(4): /replace="Thr"
  SITE (1)..(4): /note="Variant residues given in the sequence have no preference with respect to those in the annotations for variant positions"
PXXS

SEQ ID NO: 1510 - protein, 11 aa, Artificial Sequence
  source: /note="Description of Artificial Sequence: Synthetic peptide"
SGKGPRQITAL

SEQ ID NO: 1511 - protein, 14 aa, Artificial Sequence
  source: /note="Description of Artificial Sequence: Synthetic peptide"
  VARIANT (10)..(10): /replace="Gln"
  VARIANT (11)..(11): /replace="Ala"
  VARIANT (12)..(12): /replace="Tyr"
  VARIANT (13)..(13): /replace="Val" or "Met" or "Arg"
  VARIANT (14)..(14): /replace="Lys"
  SITE (1)..(14): /note="Variant residues given in the sequence have no preference with respect to those in the annotations for variant positions"
AAAAAAAAAANLTR

SEQ ID NO: 1512 - protein, 6 aa, Artificial Sequence
  source: /note="Description of Artificial Sequence: Synthetic peptide"
VYMSPF

SEQ ID NO: 1513 - protein, 7 aa, Artificial Sequence
  source: /note="Description of Artificial Sequence: Synthetic peptide"
ATWLPPR

SEQ ID NO: 1514 - protein, 12 aa, Artificial Sequence
  source: /note="Description of Artificial Sequence: Synthetic peptide"
HTMYYHHYQHHL

SEQ ID NO: 1515 - protein, 19 aa, Artificial Sequence
  source: /note="Description of Artificial Sequence: Synthetic peptide"
SEVGCRAGPLQWLCEKYFG

SEQ ID NO: 1516 - protein, 18 aa, Artificial Sequence
  source: /note="Description of Artificial Sequence: Synthetic peptide"
CGLLPVGRPDRNVWRWLC

SEQ ID NO: 1517 - protein, 15 aa, Artificial Sequence
  source: /note="Description of Artificial Sequence: Synthetic peptide"
CKGQCDRFKGLPWEC

SEQ ID NO: 1518 - protein, 5 aa, Artificial Sequence
  source: /note="Description of Artificial Sequence: Synthetic peptide"
SGRSA

SEQ ID NO: 1519 - protein, 4 aa, Artificial Sequence
  source: /note="Description of Artificial Sequence: Synthetic peptide"
WGFP

SEQ ID NO: 1520 - protein, 17 aa, Artificial Sequence
  source: /note="Description of Artificial Sequence: Synthetic peptide"
AEPMPHSLNFSQYLWYT

SEQ ID NO: 1521 - protein, 6 aa, Artificial Sequence
  source: /note="Description of Artificial Sequence: Synthetic peptide"
  VARIANT (4)..(4): /replace="Phe"
  SITE (1)..(6): /note="Variant residues given in the sequence have no preference with respect to those in the annotations for variant positions"
WAYWSP

SEQ ID NO: 1522 - protein, 7 aa, Artificial Sequence
  source: /note="Description of Artificial Sequence: Synthetic peptide"
IELLQAR

SEQ ID NO: 1523 - protein, 16 aa, Artificial Sequence
  source: /note="Description of Artificial Sequence: Synthetic peptide"
AYTKCSRQWRTCMTTH

SEQ ID NO: 1524 - protein, 15 aa, Artificial Sequence
  source: /note="Description of Artificial Sequence: Synthetic peptide"
PQNSKIPGPTFLDPH

SEQ ID NO: 1525 - protein, 15 aa, Artificial Sequence
  source: /note="Description of Artificial Sequence: Synthetic peptide"
SMEPALPDWWWKMFK

SEQ ID NO: 1526 - protein, 16 aa, Artificial Sequence
  source: /note="Description of Artificial Sequence: Synthetic peptide"
ANTPCGPYTHDCPVKR

SEQ ID NO: 1527 - protein, 12 aa, Artificial Sequence
  source: /note="Description of Artificial Sequence: Synthetic peptide"
TACHQHVRMVRP

SEQ ID NO: 1528 - protein, 12 aa, Artificial Sequence
  source: /note="Description of Artificial Sequence: Synthetic peptide"
VPWMEPAYQRFL

SEQ ID NO: 1529 - protein, 8 aa, Artificial Sequence
  source: /note="Description of Artificial Sequence: Synthetic peptide"
DPRATPGS

SEQ ID NO: 1530 - protein, 12 aa, Artificial Sequence
  source: /note="Description of Artificial Sequence: Synthetic peptide"
FRPNRAQDYNTN

SEQ ID NO: 1531 - protein, 9 aa, Artificial Sequence
  source: /note="Description of Artificial Sequence: Synthetic peptide"
CTKNSYLMC

SEQ ID NO: 1532 - protein, 11 aa, Artificial Sequence
  source: /note="Description of Artificial Sequence: Synthetic peptide"
  VARIANT (2)..(2): /replace="Arg"
  VARIANT (3)..(3): /replace="Arg"
  VARIANT (5)..(5): /replace="Asn"
  MOD_RES (6)..(7): Any amino acid
  VARIANT (9)..(9): /replace="Val"
  SITE (1)..(11): /note="Variant residues given in the sequence have no preference with respect to those in the annotations for variant positions"
CQLTGXXGAGC

SEQ ID NO: 1533 - protein, 9 aa, Artificial Sequence
  source: /note="Description of Artificial Sequence: Synthetic peptide"
CPIEDRPMC

SEQ ID NO: 1534 - protein, 12 aa, Artificial Sequence
  source: /note="Description of Artificial Sequence: Synthetic peptide"
HEWSYLAPYPWF

SEQ ID NO: 1535 - protein, 9 aa, Artificial Sequence
  source: /note="Description of Artificial Sequence: Synthetic peptide"
MCPKHPLGC

SEQ ID NO: 1536 - protein, 15 aa, Artificial Sequence
  source: /note="Description of Artificial Sequence: Synthetic peptide"
RMWPSSTVNLSAGRR

SEQ ID NO: 1537 - protein, 20 aa, Artificial Sequence
  source: /note="Description of Artificial Sequence: Synthetic peptide"
SAKTAVSQRVWLPSHRGGEP

SEQ ID NO: 1538 - protein, 20 aa, Artificial Sequence
  source: /note="Description of Artificial Sequence: Synthetic peptide"
KSREHVNNSACPSKRITAAL

SEQ ID NO: 1539 - protein, 4 aa, Artificial Sequence
  source: /note="Description of Artificial Sequence: Synthetic peptide"
EGFR

SEQ ID NO: 1540 - protein, 6 aa, Artificial Sequence
  source: /note="Description of Artificial Sequence: Synthetic peptide"
AGLGVR

SEQ ID NO: 1541 - protein, 15 aa, Artificial Sequence
  source: /note="Description of Artificial Sequence: Synthetic peptide"
GTRQGHTMRLGVSDG

SEQ ID NO: 1542 - protein, 15 aa, Artificial Sequence
  source: /note="Description of Artificial Sequence: Synthetic peptide"
IAGLATPGWSHWLAL

SEQ ID NO: 1543 - protein, 7 aa, Artificial Sequence
  source: /note="Description of Artificial Sequence: Synthetic peptide"
SMSIARL

SEQ ID NO: 1544 - protein, 7 aa, Artificial Sequence
  source: /note="Description of Artificial Sequence: Synthetic peptide"
HTFEPGV

SEQ ID NO: 1545 - protein, 15 aa, Artificial Sequence
  source: /note="Description of Artificial Sequence: Synthetic peptide"
NTSLKRISNKRIRRK

SEQ ID NO: 1546 - protein, 15 aa, Artificial Sequence
  source: /note="Description of Artificial Sequence: Synthetic peptide"
LRIKRKRRKRKKTRK

SEQ ID NO: 1547 - DNA, 21 bp, Adeno-associated virus 2
agcvvmdcaggarscascaac

SEQ ID NO: 1548 - protein, 7 aa, Artificial Sequence
  source: /note="Description of Artificial Sequence: Synthetic peptide"
SDSGASN

SEQ ID NO: 1549 - protein, 7 aa, Artificial Sequence
  source: /note="Description of Artificial Sequence: Synthetic peptide"
SPSGASN

SEQ ID NO: 1550 - protein, 7 aa, Artificial Sequence
  source: /note="Description of Artificial Sequence: Synthetic peptide"
SHSGASN

SEQ ID NO: 1551 - protein, 7 aa, Artificial Sequence
  source: /note="Description of Artificial Sequence: Synthetic peptide"
SRSGASN

SEQ ID NO: 1552 - protein, 7 aa, Artificial Sequence
  source: /note="Description of Artificial Sequence: Synthetic peptide"
SKSGASN

SEQ ID NO: 1553 - protein, 7 aa, Artificial Sequence
  source: /note="Description of Artificial Sequence: Synthetic peptide"
SNSGASN

SEQ ID NO: 1554 - protein, 7 aa, Artificial Sequence
  source: /note="Description of Artificial Sequence: Synthetic peptide"
SGSGASN

SEQ ID NO: 1555 - protein, 7 aa, Artificial Sequence
  source: /note="Description of Artificial Sequence: Synthetic peptide"
SASGASN

SEQ ID NO: 1556 - protein, 7 aa, Artificial Sequence
  source: /note="Description of Artificial Sequence: Synthetic peptide"
SESGTSN

SEQ ID NO: 1557 - protein, 7 aa, Artificial Sequence
  source: /note="Description of Artificial Sequence: Synthetic peptide"
STTGGSN

SEQ ID NO: 1558 - protein, 7 aa, Artificial Sequence
  source: /note="Description of Artificial Sequence: Synthetic peptide"
SSAGSTN

SEQ ID NO: 1559 - protein, 6 aa, Artificial Sequence
  source: /note="Description of Artificial Sequence: Synthetic peptide"
NNDSQA

SEQ ID NO: 1560 - protein, 6 aa, Artificial Sequence
  source: /note="Description of Artificial Sequence: Synthetic peptide"
NNRNQA

SEQ ID NO: 1561 - protein, 6 aa, Artificial Sequence
  source: /note="Description of Artificial Sequence: Synthetic peptide"
NNNKQA

SEQ ID NO: 1562 - protein, 6 aa, Artificial Sequence
  source: /note="Description of Artificial Sequence: Synthetic peptide"
NAKRQA

SEQ ID NO: 1563 - protein, 6 aa, Artificial Sequence
  source: /note="Description of Artificial Sequence: Synthetic peptide"
NDEHQA

SEQ ID NO: 1564 - protein, 6 aa, Artificial Sequence
  source: /note="Description of Artificial Sequence: Synthetic peptide"
NTSQKA

SEQ ID NO: 1565 - protein, 25 aa, Artificial Sequence
  source: /note="Description of Artificial Sequence: Synthetic peptide"
YYLSRTNTPSGTDTQSRLVFSQAGA

SEQ ID NO: 1566 - protein, 25 aa, Artificial Sequence
  source: /note="Description of Artificial Sequence: Synthetic peptide"
YYLSRTNTDSGTETQSGLDFSQAGA

SEQ ID NO: 1567 - protein, 25 aa, Artificial Sequence
  source: /note="Description of Artificial Sequence: Synthetic peptide"
YYLSRTNTESGTPTQSALEFSQAGA

SEQ ID NO: 1568 - protein, 25 aa, Artificial Sequence
  source: /note="Description of Artificial Sequence: Synthetic peptide"
YYLSRTNTHSGTHTQSPLHFSQAGA

SEQ ID NO: 1569 - protein, 25 aa, Artificial Sequence
  source: /note="Description of Artificial Sequence: Synthetic peptide"
YYLSRTNTSSGTITISHLIFSQAGA

SEQ ID NO: 1570 - protein, 25 aa, Artificial Sequence
  source: /note="Description of Artificial Sequence: Synthetic peptide"
YYLSRTNTRSGIMTKSSLMFSQAGA

SEQ ID NO: 1571 - protein, 25 aa, Artificial Sequence
  source: /note="Description of Artificial Sequence: Synthetic peptide"
YYLSRTNTKSGRKTLSNLSFSQAGA

SEQ ID NO: 1572 - protein, 25 aa, Artificial Sequence
  source: /note="Description of Artificial Sequence: Synthetic peptide"
YYLSRTNDGSGPVTPSKLRFSQRGA

SEQ ID NO: 1573 - protein, 25 aa, Artificial Sequence
  source: /note="Description of Artificial Sequence: Synthetic peptide"
YYLSRTNAASGHATHSDLKFSQPGA

SEQ ID NO: 1574 - protein, 25 aa, Artificial Sequence
  source: /note="Description of Artificial Sequence: Synthetic peptide"
YYLSRTNGQAGSLTMSELGFSQVGA

SEQ ID NO: 1575 - protein, 25 aa, Artificial Sequence
  source: /note="Description of Artificial Sequence: Synthetic peptide"
YYLSRTNSTGGNQTTSQLLFSQLSA

SEQ ID NO: 1576 - protein, 25 aa, Artificial Sequence
  source: /note="Description of Artificial Sequence: Synthetic peptide"
YFLSRTNNNTGLNTNSTLNFSQGRA

SEQ ID NO: 1577 - protein, 16 aa, Artificial Sequence
  source: /note="Description of Artificial Sequence: Synthetic peptide"
SKTGADNNNSEYSWTG

SEQ ID NO: 1578 - protein, 16 aa, Artificial Sequence
  source: /note="Description of Artificial Sequence: Synthetic peptide"
SKTDADNNNSEYSWTG

SEQ ID NO: 1579 - protein, 16 aa, Artificial Sequence
  source: /note="Description of Artificial Sequence: Synthetic peptide"
SKTEADNNNSEYSWTG

SEQ ID NO: 1580 - protein, 16 aa, Artificial Sequence
  source: /note="Description of Artificial Sequence: Synthetic peptide"
SKTPADNNNSEYSWTG

SEQ ID NO: 1581 - protein, 16 aa, Artificial Sequence
  source: /note="Description of Artificial Sequence: Synthetic peptide"
SKTHADNNNSEYSWTG

SEQ ID NO: 1582 - protein, 16 aa, Artificial Sequence
  source: /note="Description of Artificial Sequence: Synthetic peptide"
SKTQADNNNSEYSWTG

SEQ ID NO: 1583 - protein, 16 aa, Artificial Sequence
  source: /note="Description of Artificial Sequence: Synthetic peptide"
SKTIADNNNSEYSWTG

SEQ ID NO: 1584 - protein, 16 aa, Artificial Sequence
  source: /note="Description of Artificial Sequence: Synthetic peptide"
SKTMADNNNSEYSWTG

SEQ ID NO: 1585 - protein, 16 aa, Artificial Sequence
  source: /note="Description of Artificial Sequence: Synthetic peptide"
SKTRADNNNSEYSWTG

SEQ ID NO: 1586 - protein, 16 aa, Artificial Sequence
  source: /note="Description of Artificial Sequence: Synthetic peptide"
SKTNADNNNSEYSWTG

SEQ ID NO: 1587 - protein, 16 aa, Artificial Sequence
  source: /note="Description of Artificial Sequence: Synthetic peptide"
SKTVGRNNNSEYSWTG

SEQ ID NO: 1588 - protein, 16 aa, Artificial Sequence
  source: /note="Description of Artificial Sequence: Synthetic peptide"
SKTADRNNNSEYSWTG

SEQ ID NO: 1589 - protein, 16 aa, Artificial Sequence
  source: /note="Description of Artificial Sequence: Synthetic peptide"
SKKLSQNNNSKYSWQG

SEQ ID NO: 1590 - protein, 16 aa, Artificial Sequence
  source: /note="Description of Artificial Sequence: Synthetic peptide"
SKPTTGNNNSDYSWPG

SEQ ID NO: 1591 - protein, 16 aa, Artificial Sequence
  source: /note="Description of Artificial Sequence: Synthetic peptide"
STQKNENNNSNYSWPG

SEQ ID NO: 1592 - protein, 8 aa, Artificial Sequence
  source: /note="Description of Artificial Sequence: Synthetic peptide"
HKDDEGKF

SEQ ID NO: 1593 - protein, 8 aa, Artificial Sequence
  source: /note="Description of Artificial Sequence: Synthetic peptide"
HKDDNRKF

SEQ ID NO: 1594 - protein, 8 aa, Artificial Sequence
  source: /note="Description of Artificial Sequence: Synthetic peptide"
HKDDTNKF

SEQ ID NO: 1595 - protein, 8 aa, Artificial Sequence
  source: /note="Description of Artificial Sequence: Synthetic peptide"
HEDSDKNF

SEQ ID NO: 1596 - protein, 8 aa, Artificial Sequence
  source: /note="Description of Artificial Sequence: Synthetic peptide"
HRDGADSF

SEQ ID NO: 1597 - protein, 8 aa, Artificial Sequence
  source: /note="Description of Artificial Sequence: Synthetic peptide"
HGDNKSRF

SEQ ID NO: 1598 - protein, 14 aa, Artificial Sequence
  source: /note="Description of Artificial Sequence: Synthetic peptide"
KQGSEKTNVDFEEV

SEQ ID NO: 1599 - protein, 14 aa, Artificial Sequence
  source: /note="Description of Artificial Sequence: Synthetic peptide"
KQGSEKTNVDSEEV

SEQ ID NO: 1600 - protein, 14 aa, Artificial Sequence
  source: /note="Description of Artificial Sequence: Synthetic peptide"
KQGSEKTNVDVEEV

SEQ ID NO: 1601 - protein, 14 aa, Artificial Sequence
  source: /note="Description of Artificial Sequence: Synthetic peptide"
KQGSDKTNVDDAGV

SEQ ID NO: 1602 - protein, 14 aa, Artificial Sequence
  source: /note="Description of Artificial Sequence: Synthetic peptide"
KQGSSKTNVDPREV

SEQ ID NO: 1603 - protein, 14 aa, Artificial Sequence
  source: /note="Description of Artificial Sequence: Synthetic peptide"
KQGSRKTNVDHKQV

SEQ ID NO: 1604 - protein, 14 aa, Artificial Sequence
  source: /note="Description of Artificial Sequence: Synthetic peptide"
KQGSKGGNVDTNRV

SEQ ID NO: 1605 - protein, 14 aa, Artificial Sequence
  source: /note="Description of Artificial Sequence: Synthetic peptide"
KQGSGEANVDNGDV

SEQ ID NO: 1606 - protein, 14 aa, Artificial Sequence
  source: /note="Description of Artificial Sequence: Synthetic peptide"
KQDAAADNIDYDHV

SEQ ID NO: 1607 - protein, 14 aa, Artificial Sequence
  source: /note="Description of Artificial Sequence: Synthetic peptide"
KQSGTRSNAAASSV

SEQ ID NO: 1608 - protein, 14 aa, Artificial Sequence
  source: /note="Description of Artificial Sequence: Synthetic peptide"
KENTNTNDTELTNV

SEQ ID NO: 1609 - protein, 14 aa, Artificial Sequence
  source: /note="Description of Artificial Sequence: Synthetic peptide"
QRGNNVAATADVNT

SEQ ID NO: 1610 - protein, 14 aa, Artificial Sequence
  source: /note="Description of Artificial Sequence: Synthetic peptide"
QRGNNEAATADVNT

SEQ ID NO: 1611 - protein, 14 aa, Artificial Sequence
  source: /note="Description of Artificial Sequence: Synthetic peptide"
QRGNNPAATADVNT

SEQ ID NO: 1612 - protein, 14 aa, Artificial Sequence
  source: /note="Description of Artificial Sequence: Synthetic peptide"
QRGNNHAATADVNT

SEQ ID NO: 1613 - protein, 14 aa, Artificial Sequence
  source: /note="Description of Artificial Sequence: Synthetic peptide"
QEENNIAATPGVNT

SEQ ID NO: 1614 - protein, 14 aa, Artificial Sequence
  source: /note="Description of Artificial Sequence: Synthetic peptide"
QPPNNMAATHEVNT

SEQ ID NO: 1615 - protein, 14 aa, Artificial Sequence
  source: /note="Description of Artificial Sequence: Synthetic peptide"
QHHNNSAATTIVNT

SEQ ID NO: 1616 - protein, 14 aa, Artificial Sequence
  source: /note="Description of Artificial Sequence: Synthetic peptide"
QTTNNRAAFNMVET

SEQ ID NO: 1617 - protein, 14 aa, Artificial Sequence
  source: /note="Description of Artificial Sequence: Synthetic peptide"
QKKNNNAASKKVAT

SEQ ID NO: 1618 - protein, 14 aa, Artificial Sequence
  source: /note="Description of Artificial Sequence: Synthetic peptide"
QGGNNKAADDAVKT

SEQ ID NO: 1619 - protein, 14 aa, Artificial Sequence
  source: /note="Description of Artificial Sequence: Synthetic peptide"
QAAKGGAADDAVKT

SEQ ID NO: 1620 - protein, 14 aa, Artificial Sequence
  source: /note="Description of Artificial Sequence: Synthetic peptide"
QDDRAAAANESVDT

SEQ ID NO: 1621 - protein, 14 aa, Artificial Sequence
  source: /note="Description of Artificial Sequence: Synthetic peptide"
QQQHDDAAYQRVHT

SEQ ID NO: 1622 - protein, 14 aa, Artificial Sequence
  source: /note="Description of Artificial Sequence: Synthetic peptide"
QSSSSLAAVSTVQT

SEQ ID NO: 1623 - protein, 14 aa, Artificial Sequence
  source: /note="Description of Artificial Sequence: Synthetic peptide"
QNNQTTAAIRNVTT

SEQ ID NO: 1624 - protein, 12 aa, Artificial Sequence
  source: /note="Description of Artificial Sequence: Synthetic peptide"
NYNKKSDNVDFT

SEQ ID NO: 1625 - protein, 12 aa, Artificial Sequence
  source: /note="Description of Artificial Sequence: Synthetic peptide"
NYNKKSENVDFT

SEQ ID NO: 1626 - protein, 12 aa, Artificial Sequence
  source: /note="Description of Artificial Sequence: Synthetic peptide"
NYNKKSLNVDFT

SEQ ID NO: 1627 - protein, 12 aa, Artificial Sequence
  source: /note="Description of Artificial Sequence: Synthetic peptide"
NYNKKSPNVDFT

SEQ ID NO: 1628 - protein, 12 aa, Artificial Sequence
  source: /note="Description of Artificial Sequence: Synthetic peptide"
NYSKKSHCVDFT

SEQ ID NO: 1629 - protein, 11 aa, Artificial Sequence
  source: /note="Description of Artificial Sequence: Synthetic peptide"
NYRKTIYVDFT

SEQ ID NO: 1630 - protein, 11 aa, Artificial Sequence
  source: /note="Description of Artificial Sequence: Synthetic peptide"
NYKEKKDVHFT

SEQ ID NO: 1631 - protein, 11 aa, Artificial Sequence
  source: /note="Description of Artificial Sequence: Synthetic peptide"
NYGHRAIVQFT

SEQ ID NO: 1632 - protein, 11 aa, Artificial Sequence
  source: /note="Description of Artificial Sequence: Synthetic peptide"
NYANHQFVVCT

SEQ ID NO: 1633 - protein, 12 aa, Artificial Sequence
  source: /note="Description of Artificial Sequence: Synthetic peptide"
NYDDDPTGVLLT

SEQ ID NO: 1634 - protein, 11 aa, Artificial Sequence
  source: /note="Description of Artificial Sequence: Synthetic peptide"
NYDDPTGVLLT

SEQ ID NO: 1635 - protein, 11 aa, Artificial Sequence
  source: /note="Description of Artificial Sequence: Synthetic peptide"
NFEQQNSVEWT

SEQ ID NO: 1636 - protein, 7 aa, Artificial Sequence
  source: /note="Description of Artificial Sequence: Synthetic peptide"
SQSGASN

SEQ ID NO: 1637 - protein, 6 aa, Artificial Sequence
  source: /note="Description of Artificial Sequence: Synthetic peptide"
NNGSQA

SEQ ID NO: 1638 - protein, 25 aa, Artificial Sequence
  source: /note="Description of Artificial Sequence: Synthetic peptide"
YYLSRTNTPSGTTTWSRLQFSQAGA

SEQ ID NO: 1639 - protein, 16 aa, Artificial Sequence
  source: /note="Description of Artificial Sequence: Synthetic peptide"
SKTSADNNNSEYSWTG

SEQ ID NO: 1640 - protein, 8 aa, Artificial Sequence
  source: /note="Description of Artificial Sequence: Synthetic peptide"
HKDDEEKF

SEQ ID NO: 1641 - protein, 14 aa, Artificial Sequence
  source: /note="Description of Artificial Sequence: Synthetic peptide"
KQGSEKTNVDIEEV

SEQ ID NO: 1642 - protein, 14 aa, Artificial Sequence
  source: /note="Description of Artificial Sequence: Synthetic peptide"
QRGNNQAATADVNT

SEQ ID NO: 1643 - protein, 12 aa, Artificial Sequence
  source: /note="Description of Artificial Sequence: Synthetic peptide"
NYNKKSVNVDFT

SEQ ID NO: 1644 - protein, 42 aa, Artificial Sequence
  source: /note="Description of Artificial Sequence: Synthetic polypeptide"
SQSGASNYNTPSGTTTQSRLQFSTSADNNNSEYSWTGATKYH

SEQ ID NO: 1645 - protein, 42 aa, Artificial Sequence
  source: /note="Description of Artificial Sequence: Synthetic polypeptide"
SASGASNFNSEGGSLTQSSLGFSTDGENNNSDFSWTGATKYH

SEQ ID NO: 1646 - protein, 42 aa, Artificial Sequence
  source: /note="Description of Artificial Sequence: Synthetic polypeptide"
SQSGASNYNTPSGTTTQSRLQFSTDGENNNSDFSWTGATKYH

SEQ ID NO: 1647 - protein, 42 aa, Artificial Sequence
  source: /note="Description of Artificial Sequence: Synthetic polypeptide"
SASGASNYNTPSGTTTQSRLQFSTSADNNNSEFSWPGATTYH

SEQ ID NO: 1648 - protein, 42 aa, Artificial Sequence
  source: /note="Description of Artificial Sequence: Synthetic polypeptide"
SQSGASNFNSEGGSLTQSSLGFSTDGENNNSDFSWTGATKYH

SEQ ID NO: 1649 - protein, 42 aa, Artificial Sequence
  source: /note="Description of Artificial Sequence: Synthetic polypeptide"
SASGASNYNTPSGSLTQSSLGFSTDGENNNSDFSWTGATKYH

SEQ ID NO: 1650 - protein, 42 aa, Artificial Sequence
  source: /note="Description of Artificial Sequence: Synthetic polypeptide"
SQSGASNYNTPSGTTTQSRLQFSTSADNNNSDFSWTGATKYH

SEQ ID NO: 1651 - protein, 42 aa, Artificial Sequence
  source: /note="Description of Artificial Sequence: Synthetic polypeptide"
SGAGASNFNSEGGSLTQSSLGFSTDGENNNSDFSWTGATKYH

SEQ ID NO: 1652 - protein, 7 aa, Artificial Sequence
  source: /note="Description of Artificial Sequence: Synthetic peptide"
SGAGASN

SEQ ID NO: 1653 - protein, 15 aa, Artificial Sequence
  source: /note="Description of Artificial Sequence: Synthetic peptide"
NSEGGSLTQSSLGFS

SEQ ID NO: 1654 - protein, 11 aa, Artificial Sequence
  source: /note="Description of Artificial Sequence: Synthetic peptide"
TDGENNNSDFS

SEQ ID NO: 1655 - protein, 10 aa, Artificial Sequence
  source: /note="Description of Artificial Sequence: Synthetic peptide"
SEFSWPGATT

SEQ ID NO: 1656 - protein, 13 aa, Artificial Sequence
  source: /note="Description of Artificial Sequence: Synthetic peptide"
TSADNNNSDFSWT

SEQ ID NO: 1657 - protein, 8 aa, Artificial Sequence
  source: /note="Description of Artificial Sequence: Synthetic peptide"
SQSGASNY

SEQ ID NO: 1658 - protein, 15 aa, Artificial Sequence
  source: /note="Description of Artificial Sequence: Synthetic peptide"
NTPSGTTTQSRLQFS

SEQ ID NO: 1659 - protein, 19 aa, Artificial Sequence
  source: /note="Description of Artificial Sequence: Synthetic peptide"
TSADNNNSEYSWTGATKYH

SEQ ID NO: 1660 - protein, 8 aa, Artificial Sequence
  source: /note="Description of Artificial Sequence: Synthetic peptide"
SASGASNF

SEQ ID NO: 1661 - protein, 19 aa, Artificial Sequence
  source: /note="Description of Artificial Sequence: Synthetic peptide"
TDGENNNSDFSWTGATKYH

SEQ ID NO: 1662 - protein, 8 aa, Artificial Sequence
  source: /note="Description of Artificial Sequence: Synthetic peptide"
SASGASNY

SEQ ID NO: 1663 - protein, 19 aa, Artificial Sequence
  source: /note="Description of Artificial Sequence: Synthetic peptide"
TSADNNNSEFSWPGATTYH

SEQ ID NO: 1664 - protein, 15 aa, Artificial Sequence
  source: /note="Description of Artificial Sequence: Synthetic peptide"
NTPSGSLTQSSLGFS

SEQ ID NO: 1665 - protein, 19 aa, Artificial Sequence
  source: /note="Description of Artificial Sequence: Synthetic peptide"
TSADNNNSDFSWTGATKYH

SEQ ID NO: 1666 - protein, 8 aa, Artificial Sequence
  source: /note="Description of Artificial Sequence: Synthetic peptide"
SGAGASNF

SEQ ID NO: 1667 - DNA, 48 bp, Artificial Sequence
  source: /note="Description of Artificial Sequence: Synthetic oligonucleotide"
  modified_base (20)..(20): a, c, g, or t
  modified_base (35)..(35): a, c, g, or t
ctccagvvsvvsmrsrvcvnsgcagctdhcvvsrnsgtcvmsacacaa

SEQ ID NO: 1668 - DNA, 48 bp, Artificial Sequence
  source: /note="Description of Artificial Sequence: Synthetic oligonucleotide"
ctccagagaggcaacagacaagcagctaccgcagatgtcaacacacaa

SEQ ID NO: 1669 - protein, 7 aa, Artificial Sequence
  source: /note="Description of Artificial Sequence: Synthetic peptide"
SAAGASN

SEQ ID NO: 1670 - protein, 24 aa, Artificial Sequence
  source: /note="Description of Artificial Sequence: Synthetic peptide"
YFLSRTNTESGSTTQSTLRFSQAG

SEQ ID NO: 1671 - protein, 13 aa, Artificial Sequence
  source: /note="Description of Artificial Sequence: Synthetic peptide"
SKTSADNNNSDFS

SEQ ID NO: 1672 - protein, 14 aa, Artificial Sequence
  source: /note="Description of Artificial Sequence: Synthetic peptide"
KQGSEKTDVDIDKV

SEQ ID NO: 1673 - protein, 7 aa, Artificial Sequence
  source: /note="Description of Artificial Sequence: Synthetic peptide"
STAGASN

SEQ ID NO: 1674 - protein, 24 aa, Artificial Sequence
  source: /note="Description of Artificial Sequence: Synthetic peptide"
YFLSRTNTTSGIETQSTLRFSQAG

SEQ ID NO: 1675 - protein, 13 aa, Artificial Sequence
  source: /note="Description of Artificial Sequence: Synthetic peptide"
SKTDGENNNSDFS

SEQ ID NO: 1676 - protein, 14 aa, Artificial Sequence
  source: /note="Description of Artificial Sequence: Synthetic peptide"
KQGAAADDVEIDGV

SEQ ID NO: 1677 - protein, 7 aa, Artificial Sequence
  source: /note="Description of Artificial Sequence: Synthetic peptide"
SEAGASN

SEQ ID NO: 1678 - protein, 24 aa, Artificial Sequence
  source: /note="Description of Artificial Sequence: Synthetic peptide"
YYLSRTNTPSGTTTQSRLQFSQAG

SEQ ID NO: 1679 - protein, 13 aa, Artificial Sequence
  source: /note="Description of Artificial Sequence: Synthetic peptide"
SKTSADNNNSEYS

SEQ ID NO: 1680 - protein, 14 aa, Artificial Sequence
  source: /note="Description of Artificial Sequence: Synthetic peptide"
KQGSEKTNVDIEKV

SEQ ID NO: 1681 - protein, 24 aa, Artificial Sequence
  source: /note="Description of Artificial Sequence: Synthetic peptide"
YFLSRTNDASGSDTKSTLLFSQAG

SEQ ID NO: 1682 - protein, 13 aa, Artificial Sequence
  source: /note="Description of Artificial Sequence: Synthetic peptide"
STTPSENNNSEYS

SEQ ID NO: 1683 - protein, 7 aa, Artificial Sequence
  source: /note="Description of Artificial Sequence: Synthetic peptide"
SAAGATN

SEQ ID NO: 1684 - protein, 24 aa, Artificial Sequence
  source: /note="Description of Artificial Sequence: Synthetic peptide"
YFLSRTNGEAGSATLSELRFSQAG

SEQ ID NO: 1685 - protein, 8 aa, Artificial Sequence
  source: /note="Description of Artificial Sequence: Synthetic peptide"
HGDDADRF

SEQ ID NO: 1686 - protein, 14 aa, Artificial Sequence
  source: /note="Description of Artificial Sequence: Synthetic peptide"
KQGAEKSDVEVDRV

SEQ ID NO: 1687 - protein, 14 aa, Artificial Sequence
  source: /note="Description of Artificial Sequence: Synthetic peptide"
KQDSGGDNIDIDQV

SEQ ID NO: 1688 - protein, 7 aa, Artificial Sequence
  source: /note="Description of Artificial Sequence: Synthetic peptide"
SDAGASN

SEQ ID NO: 1689 - protein, 24 aa, Artificial Sequence
  source: /note="Description of Artificial Sequence: Synthetic peptide"
YFLSRTNTEGGHDTQSTLRFSQAG

SEQ ID NO: 1690 - protein, 14 aa, Artificial Sequence
  source: /note="Description of Artificial Sequence: Synthetic peptide"
KEDGGGSDVAIDEV

SEQ ID NO: 1691 - protein, 7 aa, Artificial Sequence
  source: /note="Description of Artificial Sequence: Synthetic peptide"
SNAGASN

SEQ ID NO: 1692 - protein, 24 aa, Artificial Sequence
  source: /note="Description of Artificial Sequence: Synthetic peptide"
YFLSRTNGEAGSATLSELRFSQPG

SEQ ID NO: 1693 - DNA, 21 bp, Artificial Sequence
  source: /note="Description of Artificial Sequence: Synthetic oligonucleotide"
agcvvmdcaggarscascaac

SEQ ID NO: 1694 - DNA, 18 bp, Artificial Sequence
  source: /note="Description of Artificial Sequence: Synthetic oligonucleotide"
aacracrrsmrsmaggca

SEQ ID NO: 1695 - DNA, 24 bp, Artificial Sequence
  source: /note="Description of Artificial Sequence: Synthetic oligonucleotide"
cacrrggacrrcrmsrrsarsttt

SEQ ID NO: 1696 - DNA, 75 bp, Artificial Sequence
  source: /note="Description of Artificial Sequence: Synthetic oligonucleotide"
  modified_base (35)..(35): a, c, g, or t
tatttcttgagcagaacaaacrvcvvsrscggamncvhsacgmhstcavvscttvdsttttctcagsbcrgsgcg

SEQ ID NO: 1697 - DNA, 48 bp, Artificial Sequence
  source: /note="Description of Artificial Sequence: Synthetic oligonucleotide"
  modified_base (11)..(11): a, c, g, or t
tcaamammavnsrvcsrsaacaacaacagtrasttctcgtggmmagga

SEQ ID NO: 1698 - DNA, 42 bp, Artificial Sequence
  source: /note="Description of Artificial Sequence: Synthetic oligonucleotide"
  modified_base (31)..(31): a, c, g, or t
aagsaarrcrscrvsrvarvcratrycgmsnhcrvmvrsgtc

SEQ ID NO: 1699 - DNA, 42 bp, Artificial Sequence
  source: /note="Description of Artificial Sequence: Synthetic oligonucleotide"
  modified_base (17)..(17): a, c, g, or t
  modified_base (32)..(32): a, c, g, or t
cagvvsvvsmrsrvcvnsgcagctdhcvvsrnsgtcvmsaca

SEQ ID NO: 1700 - DNA, 33 bp, Artificial Sequence
  source: /note="Description of Artificial Sequence: Synthetic oligonucleotide"
aactwcrvsvasmvsvhsddtgtgswstksact

SEQ ID NO: 1701 - DNA, 30 bp, Artificial Sequence
  source: /note="Description of Artificial Sequence: Synthetic oligonucleotide"
ttgttgaacatcaccacgtgacgcacgttc

SEQ ID NO: 1702 - DNA, 30 bp, Artificial Sequence
  source: /note="Description of Artificial Sequence: Synthetic oligonucleotide"
tccccgtggttctactacataatgtggccg

SEQ ID NO: 1703 - DNA, 30 bp, Artificial Sequence
  source: /note="Description of Artificial Sequence: Synthetic oligonucleotide"
ttccacactccgttttggataatgttgaac

SEQ ID NO: 1704 - DNA, 30 bp, Artificial Sequence
  source: /note="Description of Artificial Sequence: Synthetic oligonucleotide"
agggacatccccagctccatgctgtggtcg

SEQ ID NO: 1705 - DNA, 30 bp, Artificial Sequence
  source: /note="Description of Artificial Sequence: Synthetic oligonucleotide"
agggacaacccctccgactcgccctaatcc

SEQ ID NO: 1706 - DNA, 30 bp, Artificial Sequence
  source: /note="Description of Artificial Sequence: Synthetic oligonucleotide"
tcctagtagaagacaccctctcactgcccg

SEQ ID NO: 1707 - DNA, 30 bp, Artificial Sequence
  source: /note="Description of Artificial Sequence: Synthetic oligonucleotide"
agtaccatgtacacccactctcccagtgcc

SEQ ID NO: 1708 - DNA, 30 bp, Artificial Sequence
  source: /note="Description of Artificial Sequence: Synthetic oligonucleotide"
atatggacgttcatgctgatcaccataccg

SEQ ID NO: 1709 - DNA, 30 bp, Artificial Sequence
  source: /note="Description of Artificial Sequence: Synthetic oligonucleotide"
agcaggagctccttggcctcagcgtgcgag

SEQ ID NO: 1710 - DNA, 30 bp, Artificial Sequence
  source: /note="Description of Artificial Sequence: Synthetic oligonucleotide"
acaagcagcttcactatgacaaccactgac

SEQ ID NO: 1711 - DNA, 284 bp, Artificial Sequence
  source: /note="Description of Artificial Sequence: Synthetic polynucleotide"
  modified_base (59)..(59): a, c, g, or t
  modified_base (244)..(244): a, c, g, or t
cagcctaggaactggcttcctggaccctgttaccgccagcagagagtctcaamammavnsrvcsrsaacaacaacagtrasttctcctggmmaggagctaccaagtaccacctcaatggcagagactctctggtgaatcccggaccagctatggcaagccacrrggacrrcrmsrrsarsttttttcctcagagcggggttctcatctttgggaagsaarrcrscrvsrvarvcratrycgmsnhcrvmvrsgtcatgattacagacgaagaggagatctggac

SEQ ID NO: 1712 - DNA, 34 bp, Artificial Sequence
  source: /note="Description of Artificial Sequence: Synthetic oligonucleotide"
tgggacaatggcggtcgtctctcagagttktkkt

SEQ ID NO: 1713 - DNA, 35 bp, Artificial Sequence
  source: /note="Description of Artificial Sequence: Synthetic oligonucleotide"
agaggacckktcctcgatggttcatggtggagtta

SEQ ID NO: 1714 - DNA, 31 bp, Artificial Sequence
  source: /note="Description of Artificial Sequence: Synthetic oligonucleotide"
ccacttagggcctggtcgataccgttcggtg

SEQ ID NO: 1715 - DNA, 32 bp, Artificial Sequence
  source: /note="Description of Artificial Sequence: Synthetic oligonucleotide"
tctcgccccaagagtagaaacccttcsttyyg

SEQ ID NO: 1716 - protein, 735 aa, Adeno-associated virus 2 [sequence omitted]

SEQ ID NO: 1717 - protein, 736 aa, Adeno-associated virus 9; identical to SEQ ID NO: 132

SEQ ID NO: 1718 - protein, 7 aa, Artificial Sequence
  source: /note="Description of Artificial Sequence: Synthetic peptide"
GSTPPPM

SEQ ID NO: 1719 - protein, 7 aa, Artificial Sequence
  source: /note="Description of Artificial Sequence: Synthetic peptide"
GETRAPL

SEQ ID NO: 1720 - protein, 6 aa, Artificial Sequence
  source: /note="Description of Artificial Sequence: Synthetic peptide"
SPAKFA

SEQ ID NO: 1721 - protein, 6 aa, Artificial Sequence
  source: /note="Description of Artificial Sequence: Synthetic peptide"
NKDKLN

SEQ ID NO: 1722 - DNA, 2232 bp, Artificial Sequence
  source: /note="Description of Artificial Sequence: Synthetic polynucleotide"
atggctgccgatggttatcttccagattggctcgaggacaaccttagtgaaggaattcgcgagtggtgggctttgaaacctggagcccctcaacccaaggcaaatcaacaacatcaagacaacgctcgaggtcttgtgcttccgggttacaaataccttggacccggcaacggactcgacaagggggagccggtcaacgcagcagacgcggcggccctcgagcacgacaaggcctacgaccagcagctcaaggccggagacaacccgtacctcaagtacaaccacgccgacgccgagttccaggagcggctcaaagaagatacgtcttttgggggcaacctcgggcgagcagtcttccaggccaaaaagaggcttcttgaacctcttggtctggttgaggaagcggctaagacggctcctggaaagaagaggcctgtagagcagtctcctcaggaaccggactcctccgcgggtattggcaaatcgggtgcacagcccgctaaaaagagactcaatttcggtcagactggcgacacagagtcagtcccagaccctcaaccaatcggagaacctcccgcagccccctcaggtgtgggatctcttacaatggcttcaggtggtggcgcaccagtggcagacaataacgaaggtgccgatggagtgggtagttcctcgggaaattggcattgcgattcccaatggctgggggacagagtcatcaccaccagcacccgaacctgggccctgcccacctacaacaatcacctctacaagcaaatctccaacagcacatctggaggatcttcaaatgacaacgcctacttcggctacagcaccccctgggggtattttgacttcaacagattccactgccacttctcaccacgtgactggcagcgactcatcaacaacaactggggattccggcctaagcgactcaacttcaagctcttcaacattcaggtcaaagaggttacggacaacaatggagtcaagaccatcgccaataaccttaccagcacggtccaggtcttcacggactcagactatcagctcccgtacgtgctcgggtcggctcacgagggctgcctcccgccgttcccagcggacgttttcatgattcctcagtacgggtatctgacgcttaatgatggaagccaggccgtgggtcgttcgtccttttactgcctggaatatttcccgtcgcaaatgctaagaacgggtaacaacttccagttcagctacgagtttgagaacgtacctttccatagcagctacgctcacagccaaagcctggaccgactaatgaatccactcatcgaccaatacttgtactatctctcaaagactattaacggttctggacagaatcaacaaacgctaaaattcagtgtggccggacccagcaacatggctgtccagggaagaaactacatacctggacccagctaccgacaacaacgtgtctcaaccactgtgactcaaaacaacaacagcgaatttgcttggcctggagcttcttcttgggctctcaatggacgtaatagcttgatgaatcctggacctgctatggccagccacaaagaaggagaggaccgtttctttcctttgtctggatctttaatttttggcaaacaaggaactggaagagacaacgtggatgcggacaaagtcatgataaccaacgaagaagaaattaaaactactaacccggtagcaacggagtcctatggacaagtggccacaaaccaccagagtgatgggactttggcggtgccttttaaggcacaggcgcagaccggctgggttcaaaaccaaggaatacttccgggtatggtttggcaggacagagatgtgtacctgcaaggacccatttgggccaaaattcctcacacggacggcaactttcacccttctccgctgatgggagggtttggaatgaagcacccgcctcctcagatcctcatcaaaaacacacctgtacctgcggatcctccaacggccttcaacaaggacaagctgaactctttcatcacccagtattctactggccaagtcagcgtggagatcgagtgggagctgcagaaggaaaacagcaagcgctggaacccggagatccagtacacttccaactattacaagtctaataatgttgaatttgctgttaatactgaaggtgtatatagtgaaccccgccccattggcaccagatacctgactcgtaatctgtaa

SEQ ID NO: 1723 - DNA, 2232 bp, Artificial Sequence
  source: /note="Description of Artificial Sequence: Synthetic polynucleotide"
atggctgccgatggttatcttccagattggctcgaggacaaccttagtgaaggaattcgcgagtggtgggctttgaaacctggagcccctcaacccaaggcaaatcaacaacatcaagacaacgctcgaggtcttgtgcttccgggttacaaataccttggacccggcaacggactcgacaagggggagccggtcaacgcagcagacgcggcggccctcgagcacgacaaggcctacgaccagcagctcaaggccggagacaacccgtacctcaagtacaaccacgccgacgccgagttccaggagcggctcaaagaagatacgtcttttgggggcaacctcgggcgagcagtcttccaggccaaaaagaggcttcttgaacctcttggtctggttgaggaagcggctaagacggctcctggaaagaagaggcctgtagagcagtctcctcaggaaccggactcctccgcgggtattggcaaatcgggtgcacagcccgctaaaaagagactcaatttcggtcagactggcgacacagagtcagtcccagaccctcaaccaatcggagaacctcccgcagccccctcaggtgtgggatctcttacaatggcttcaggtggtggcgcaccagtggcagacaataacgaaggtgccgatggagtgggtagttcctcgggaaattggcattgcgattcccaatggctgggggacagagtcatcaccaccagcacccgaacctgggccctgcccacctacaacaatcacctctacaagcaaatctccaacagcacatctggaggatcttcaaatgacaacgcctacttcggctacagcaccccctgggggtattttgacttcaacagattccactgccacttctcaccacgtgactggcagcgactcatcaacaacaactggggattccggcctaagcgactcaacttcaagctcttcaacattcaggtcaaagaggttacggacaacaatggagtcaagaccatcgccaataaccttaccagcacggtccaggtcttcacggactcagactatcagctcccgtacgtgctcgggtcggctcacgagggctgcctcccgccgttcccagcggacgttttcatgattcctcagtacgggtatctgacgcttaatgatggaagccaggccgtgggtcgttcgtccttttactgcctggaatatttcccgtcgcaaatgctaagaacgggtaacaacttccagttcagctacgagtttgagaacgtacctttccatagcagctacgctcacagccaaagcctggaccgactaatgaatccactcatcgaccaatacttgtactatctctcaaagactattaacggttctggacagaatcaacaaacgctaaaattcagtgtggccggacccagcaacatggctgtccagggaagaaactacatacctggacccagctaccgacaacaacgtgtctcaaccactgtgactcaaaacaacaacagcgaatttgcttggcctggagcttcttcttgggctctcaatggacgtaatagcttgatgaatcctggacctgctatggccagccacaaagaaggagaggaccgtttctttcctttgtctggatctttaatttttggcaaacaaggaactggaagagacaacgtggatgcggacaaagtcatgataaccaacgaagaagaaattaaaactactaacccggtagcaacggagtcctatggacaagtggccacaaaccaccagagtgcccaaactttggcggtgccttttaaggcacaggcgcagaccggctgggttcaaaaccaaggaatacttccgggtatggtttggcaggacagagatgtgtacctgcaaggacccatttgggccaaaattcctcacacggacggcaactttcacccttctccgctgatgggagggtttggaatgaagcacccgcctcctcagatcctcatcaaaaacacacctgtacctgcggatcctccaacggccttcaacaaggacaagctgaactctttcatcacccagtattctactggccaagtcagcgtggagatcgagtgggagctgcagaaggaaaacagcaagcgctggaacccggagatccagtacacttccaactattacaagtctaataatgttgaatttgctgttaatactgaaggtgtatatagtgaaccccgccccattggcaccagatacctgactcgtaatctgtaa

SEQ ID NO: 1724 - protein, 743 aa, Artificial Sequence
  source: /note="Description of Artificial Sequence: Synthetic polypeptide"
MAADGYLPDWLEDNLSEGIREWWALKPGAPQPKANQQHQDNARGLVLPGYKYLGPGNGLDKGEPVNAADAAALEHDKAYDQQLKAGDNPYLKYNHADAEFQERLKEDTSFGGNLGRAVFQAKKRLLEPLGLVEEAAKTAPGKKRPVEQSPQEPDSSAGIGKSGAQPAKKRLNFGQTGDTESVPDPQPIGEPPAAPSGVGSLTMASGGGAPVADNNEGADGVGSSSGNWHCDSQWLGDRVITTSTRTWALPTYNNHLYKQISNSTSGGSSNDNAYFGYSTPWGYFDFNRFHCHFSPRDWQRLINNNWGFRPKRLNFKLFNIQVKEVTDNNGVKTIANNLTSTVQVFTDSDYQLPYVLGSAHEGCLPPFPADVFMIPQYGYLTLNDGSQAVGRSSFYCLEYFPSQMLRTGNNFQFSYEFENVPFHSSYAHSQSLDRLMNPLIDQYLYYLSKTINGSGQNQQTLKFSVAGPSNMAVQGRNYIPGPSYRQQRVSTTVTQNNNSEFAWPGASSWALNGRNSLMNPGPAMASHKEGEDRFFPLSGSLIFGKQGTGRDNVDADKVMITNEEEIKTTNPVATESYGQVATNHQSAQTLAVPFKAQAQTGWVQNQGILPGMVWQDRDVYLQGPIWAKIPHTDGNFHPSPLMGGFGMKHPPPQILIKNTPVPADPPTAFNKDKLNSFITQYSTGQVSVEIEWELQKENSKRWNPEIQYTSNYYKSNNVEFAVNTEGVYSEPRPIGTRYLTRNL

SEQ ID NO: 1725 - RNA, 50 nt, Artificial Sequence
  source: /note="Description of Artificial Sequence: Synthetic oligonucleotide"
uuuaugccucauccucugagugcugaaggcuugcuguaggcuguaugcug

SEQ ID NO: 1726 - RNA, 54 nt, Artificial Sequence
  source: /note="Description of Artificial Sequence: Synthetic oligonucleotide"
gugcugggcggggggcggcgggcccucccgcagaacaccaugcgcucuucggaa

SEQ ID NO: 1727 - RNA, 100 nt, Artificial Sequence
  source: /note="Description of Artificial Sequence: Synthetic polynucleotide"
gaagcaaagaaggggcagagggagcccgugagcugagugggccagggacugggagaaggagugaggaggcagggccggcaugccucugcugcuggccaga

SEQ ID NO: 1728 - RNA, 54 nt, Artificial Sequence
  source: /note="Description of Artificial Sequence: Synthetic oligonucleotide"
gugcugggcggggggcggcgggcccucccgcagaacaccaugcgcucuucggga

SEQ ID NO: 1729 - RNA, 54 nt, Artificial Sequence
  source: /note="Description of Artificial Sequence: Synthetic oligonucleotide"
gugcugggcggggggcggcgggcccucccgcagaacaccaugcgcuccacggaa

SEQ ID NO: 1730 - RNA, 35 nt, Artificial Sequence
  source: /note="Description of Artificial Sequence: Synthetic oligonucleotide"
gggcccucccgcagaacaccaugcgcuccacggaa

SEQ ID NO: 1731 - RNA, 30 nt, Artificial Sequence
  source: /note="Description of Artificial Sequence: Synthetic oligonucleotide"
cucccgcagaacaccaugcgcuccacggaa

SEQ ID NO: 1732 - RNA, 55 nt, Artificial Sequence
  source: /note="Description of Artificial Sequence: Synthetic oligonucleotide"
gugcugggcggggggcggcgggcccucccgcagaacaccaugcgcuccacggaag

SEQ ID NO: 1733 - RNA, 54 nt, Artificial Sequence
  source: /note="Description of Artificial Sequence: Synthetic oligonucleotide"
gugcugggcggggggcggcgggcccucccgcagaacaccaugcgcuccucggaa

SEQ ID NO: 1734 - RNA, 10 nt, Artificial Sequence
  source: /note="Description of Artificial Sequence: Synthetic oligonucleotide"
ugugaccugg

SEQ ID NO: 1735 - RNA, 10 nt, Artificial Sequence
  source: /note="Description of Artificial Sequence: Synthetic oligonucleotide"
ugugauuugg

SEQ ID NO: 1736 - RNA, 10 nt, Artificial Sequence
  source: /note="Description of Artificial Sequence: Synthetic oligonucleotide"
uauaauuugg

SEQ ID NO: 1737 - RNA, 11 nt, Artificial Sequence
  source: /note="Description of Artificial Sequence: Synthetic oligonucleotide"
ccugacccagu

SEQ ID NO: 1738 - RNA, 18 nt, Artificial Sequence
  source: /note="Description of Artificial Sequence: Synthetic oligonucleotide"
gucugcaccugucacuag

SEQ ID NO: 1739 - RNA, 10 nt, Artificial Sequence
  source: /note="Description of Artificial Sequence: Synthetic oligonucleotide"
gugacccaag

SEQ ID NO: 1740 - RNA, 15 nt, Artificial Sequence
  source: /note="Description of Artificial Sequence: Synthetic oligonucleotide"
guggccacugagaag

SEQ ID NO: 1741 - RNA, 10 nt, Artificial Sequence
  source: /note="Description of Artificial Sequence: Synthetic oligonucleotide"
gugacccaau

SEQ ID NO: 1742 - RNA, 10 nt, Artificial Sequence
  source: /note="Description of Artificial Sequence: Synthetic oligonucleotide"
gugacccaac

SEQ ID NO: 1743 - RNA, 15 nt, Artificial Sequence
  source: /note="Description of Artificial Sequence: Synthetic oligonucleotide"
guggccacugagaaa

SEQ ID NO: 1744 - RNA, 50 nt, Artificial Sequence
  source: /note="Description of Artificial Sequence: Synthetic oligonucleotide"
aguguaugaugccuguuacuagcauucacauggaacaaauugcugccgug

SEQ ID NO: 1745 - RNA, 52 nt, Artificial Sequence
  source: /note="Description of Artificial Sequence: Synthetic oligonucleotide"
cugaggagcgccuugacagcagccaugggagggccgcccccuaccucaguga

SEQ ID NO: 1746 - RNA, 52 nt, Artificial Sequence
  source: /note="Description of Artificial Sequence: Synthetic oligonucleotide"
cuguggagcgccuugacagcagccaugggagggccgcccccuaccucaguga

SEQ ID NO: 1747 - RNA, 100 nt, Artificial Sequence
  source: /note="Description of Artificial Sequence: Synthetic polynucleotide"
uggccguguagugcuacccagcgcuggcugccuccucagcauugcaauuccucucccaucugggcaccagucagcuacccuggugggaaucuggguagcc

SEQ ID NO: 1748 - RNA, 99 nt, Artificial Sequence
  source: /note="Description of Artificial Sequence: Synthetic oligonucleotide"
ggccguguagugcuacccagcgcuggcugccuccucagcauugcaauuccucucccaucugggcaccagucagcuacccuggugggaaucuggguagcc

SEQ ID NO: 1749 - RNA, 54 nt, Artificial Sequence
  source: /note="Description of Artificial Sequence: Synthetic oligonucleotide"
uccugaggagcgccuugacagcagccaugggagggccgcccccuaccucaguga

SEQ ID NO: 1750 - RNA, 35 nt, Artificial Sequence
  source: /note="Description of Artificial Sequence: Synthetic oligonucleotide"
cugaggagcgccuugacagcagccaugggagggcc

SEQ ID NO: 1751 - RNA, 52 nt, Artificial Sequence
  source: /note="Description of Artificial Sequence: Synthetic oligonucleotide"
cugcggagcgccuugacagcagccaugggagggccgcccccuaccucaguga

SEQ ID NO: 1752 - DNA, 26 bp, Artificial Sequence
  source: /note="Description of Artificial Sequence: Synthetic oligonucleotide"
taactataacggtcctaaggtagcga

SEQ ID NO: 1753 - DNA, 43 bp, Artificial Sequence
  source: /note="Description of Artificial Sequence: Synthetic oligonucleotide"
atacgactcgacgaagacttgatcaaccgtcggctttatggct

SEQ ID NO: 1754 - DNA, 43 bp, Artificial Sequence
  source: /note="Description of Artificial Sequence: Synthetic oligonucleotide"
atacgactcgacgaagacttgatcaaccatcggctttatggct

SEQ ID NO: 1755 - DNA, 43 bp, Artificial Sequence
  source: /note="Description of Artificial Sequence: Synthetic oligonucleotide"
atacgactcgacgaagacttgatcaaccgtaggctttatggct

SEQ ID NO: 1756 - DNA, 43 bp, Artificial Sequence
  source: /note="Description of Artificial Sequence: Synthetic oligonucleotide"
atacgactcgacgaagacttgatcctgactcggctttatggct

SEQ ID NO: 1757 - DNA, 43 bp, Artificial Sequence
  source: /note="Description of Artificial Sequence: Synthetic oligonucleotide"
atacgactcgacgaagacttagttaaccgtcggctttatggct

SEQ ID NO: 1758 - DNA, 43 bp, Artificial Sequence
  source: /note="Description of Artificial Sequence: Synthetic oligonucleotide"
atacgactcgacgaagacttagttaaccgtccgctttatggct

SEQ ID NO: 1759 - DNA, 43 bp, Artificial Sequence
  source: /note="Description of Artificial Sequence: Synthetic oligonucleotide"
atacgactcgacgaagacttagttaactgtccgctttatggct

SEQ ID NO: 1760 - DNA, 43 bp, Artificial Sequence
  source: /note="Description of Artificial Sequence: Synthetic oligonucleotide"
atacgactcgacgaagacctgccatctaaggcagtttatggct

SEQ ID NO: 1761 - DNA, 43 bp, Artificial Sequence
  source: /note="Description of Artificial Sequence: Synthetic oligonucleotide"
atacgactctgccagctcatctaagagctggcagtttatggct

SEQ ID NO: 1762 - DNA, 43 bp, Artificial Sequence
  source: /note="Description of Artificial Sequence: Synthetic oligonucleotide"
atacgactctgcctgctcatctaagagctggcagtttatggct

SEQ ID NO: 1763 - DNA, 47 bp, Artificial Sequence
  source: /note="Description of Artificial Sequence: Synthetic oligonucleotide"
atacctgccagctcttcgatctaacgaagagctggcagtttatggct

SEQ ID NO: 1764 - DNA, 47 bp, Artificial Sequence
  source: /note="Description of Artificial Sequence: Synthetic oligonucleotide"
atacctgcctgctcttcgatctaacgaagagctggcagtttatggct

SEQ ID NO: 1765 - DNA, 47 bp, Artificial Sequence
  source: /note="Description of Artificial Sequence: Synthetic oligonucleotide"
atacctgcctgctcatcgatctaacgaagagctggcagtttatggct

SEQ ID NO: 1766 - DNA, 43 bp, Artificial Sequence
  source: /note="Description of Artificial Sequence: Synthetic oligonucleotide"
atacctgccatctaaggcaggactcgacgaagactttatggct

SEQ ID NO: 1767 - DNA, 43 bp, Artificial Sequence
  source: /note="Description of Artificial Sequence: Synthetic oligonucleotide"
atacctgccagctcatctaagagctggcaggacttttatggct

SEQ ID NO: 1768 - DNA, 43 bp, Artificial Sequence
  source: /note="Description of Artificial Sequence: Synthetic oligonucleotide"
atacctgcctgctcatctaagagctggcaggacttttatggct

SEQ ID NO: 1769 - DNA, 24 bp, Artificial Sequence
  source: /note="Description of Artificial Sequence: Synthetic oligonucleotide"
atacgactcgacgaagacttgatc

SEQ ID NO: 1770 - DNA, 30 bp, Artificial Sequence
  source: /note="Description of Artificial Sequence: Synthetic oligonucleotide"
atacgactcgacgaagacttgatcctgact

SEQ ID NO: 1771 - DNA, 20 bp, Artificial Sequence
  source: /note="Description of Artificial Sequence: Synthetic oligonucleotide"
atacgactcgacgaagactt

SEQ ID NO: 1772 - DNA, 18 bp, Artificial Sequence
  source: /note="Description of Artificial Sequence: Synthetic oligonucleotide"
atacgactcgacgaagac

SEQ ID NO: 1773 - DNA, 10 bp, Artificial Sequence
  source: /note="Description of Artificial Sequence: Synthetic oligonucleotide"
aaccgtcggc

SEQ ID NO: 1774 - DNA, 10 bp, Artificial Sequence
  source: /note="Description of Artificial Sequence: Synthetic oligonucleotide"
aaccatcggc

SEQ ID NO: 1775 - DNA, 10 bp, Artificial Sequence
  source: /note="Description of Artificial Sequence: Synthetic oligonucleotide"
aaccgtaggc

SEQ ID NO: 1776 - DNA, 14 bp, Artificial Sequence
  source: /note="Description of Artificial Sequence: Synthetic oligonucleotide"
agttaaccgtcggc

SEQ ID NO: 1777 - DNA, 14 bp, Artificial Sequence
  source: /note="Description of Artificial Sequence: Synthetic oligonucleotide"
agttaaccgtccgc

SEQ ID NO: 1778 - DNA, 14 bp, Artificial Sequence
  source: /note="Description of Artificial Sequence: Synthetic oligonucleotide"
agttaactgtccgc

SEQ ID NO: 1779 - DNA, 10 bp, Artificial Sequence
  source: /note="Description of Artificial Sequence: Synthetic oligonucleotide"
ctgccagctc

SEQ ID NO: 1780 - DNA, 10 bp, Artificial Sequence
  source: /note="Description of Artificial Sequence: Synthetic oligonucleotide"
ctgcctgctc

SEQ ID NO: 1781 - DNA, 14 bp, Artificial Sequence
  source: /note="Description of Artificial Sequence: Synthetic oligonucleotide"
ctgccagctcttcg

SEQ ID NO: 1782 - DNA, 14 bp, Artificial Sequence
  source: /note="Description of Artificial Sequence: Synthetic oligonucleotide"
ctgcctgctcttcg

SEQ ID NO: 1783 - DNA, 14 bp, Artificial Sequence
  source: /note="Description of Artificial Sequence: Synthetic oligonucleotide"
ctgcctgctcatcg

SEQ ID NO: 1784 - DNA, 10 bp, Artificial Sequence
  source: /note="Description of Artificial Sequence: Synthetic oligonucleotide"
gagctggcag

SEQ ID NO: 1785 - DNA, 14 bp, Artificial Sequence
  source: /note="Description of Artificial Sequence: Synthetic oligonucleotide"
cgaagagctggcag

SEQ ID NO: 1786 - DNA, 23 bp, Artificial Sequence
  source: /note="Description of Artificial Sequence: Synthetic oligonucleotide"
gactcgacgaagactttatggct

SEQ ID NO: 1787 - DNA, 13 bp, Artificial Sequence
  source: /note="Description of Artificial Sequence: Synthetic oligonucleotide"
gacttttatggct

SEQ ID NO: 1788 - DNA, 11 bp, Artificial Sequence
  source: /note="Description of Artificial Sequence: Synthetic oligonucleotide"
  Variation (7)..(9): /replace="act" or "acg" or "ctg" or "gtg" or "ttg"
  misc_feature (1)..(11): /note="Variant nucleotides given in the sequence have no preference with respect to those in the annotations for variant positions"
gccrccatggc

SEQ ID NO: 1789 - DNA, 11 bp, Artificial Sequence
  source: /note="Description of Artificial Sequence: Synthetic oligonucleotide"
tttagatggct

SEQ ID NO: 1790 - DNA, 11 bp, Artificial Sequence
  source: /note="Description of Artificial Sequence: Synthetic oligonucleotide"
tttagatgttg

SEQ ID NO: 1791 - DNA, 11 bp, Artificial Sequence
  source: /note="Description of Artificial Sequence: Synthetic oligonucleotide"
tttttatgttg

We claim:

1. A method for producing a recombinant adeno-associated virus (rAAV), comprising:
(a) introducing at least one viral production cell (VPC) into a bioreactor and expanding the number of VPCs in the bioreactor to a target VPC cell density;
(b) introducing into the bioreactor at least one expression baculovirus infected insect cell (BIIC) which comprises an AAV viral expression construct and at least one payload BIIC which comprises an AAV payload construct;
(c) incubating the mixture of VPCs, expression BIICs and payload BIICs in the bioreactor under conditions which result in the production of one or more rAAVs within one or more of the VPCs;
(d) harvesting a viral production pool from the bioreactor, wherein the viral production pool comprises a liquid media and the one or more VPCs containing the one or more rAAVs;
(e) exposing the one or more VPCs within the viral production pool to chemical lysis using a chemical lysis solution under chemical lysis conditions, wherein the chemical lysis releases the one or more rAAVs from the VPCs into the liquid media of the viral production pool;
(f) processing the viral production pool through one or more clarification filtration steps in which the viral production pool is processed through one or more clarification filtration systems;
(g) processing the viral production pool through one or more affinity chromatography steps in which the viral production pool is processed through one or more affinity chromatography systems;
(h) processing the viral production pool through one or more ion exchange chromatography steps in which the viral production pool is processed through one or more ion exchange chromatography systems;
(i) processing the viral production pool through one or more tangential flow filtration (TFF) steps in which the viral production pool is processed through one or more tangential flow filtration (TFF) systems; and
(j) processing the viral production pool through one or more virus retentive filtration (VRF) steps in which the viral production pool is processed through one or more virus retentive filtration (VRF) systems.

2. The method of claim 1, wherein the VPCs comprise Sf9 insect cells, and wherein the rAAVs are produced using a baculovirus production system.

3. The method of any one of claims 1-2, wherein the volume of the bioreactor is at least 5 L, 10 L, 20 L, 50 L, 100 L, or 200 L.

4. The method of any one of claims 1-3, wherein the target VPC cell density at BIIC Introduction is 2.0-4.0×10⁶ cells/mL, 2.5-3.5×10⁶ cells/mL, or about 3.0×10⁶ cells/mL.

5. The method of any one of claims 1-4, wherein the ratio of VPC cells at BIIC introduction relative to the number of expression BIICs introduced into the bioreactor is between 1:2.0×10⁵-1:4.0×10⁵ v/v, between 1:2.5×10⁵-1:3.5×10⁵ v/v, about 1:2.5×10⁵ v/v, about 1:3.0×10⁵ v/v, about 1:3.5×10⁵ v/v, or about 1:4.0×10⁵ v/v.

6. The method of any one of claims 1-5, wherein the ratio of VPC cells at BIIC introduction relative to the number of payload BIICs introduced into the bioreactor is between 1:5.0×10⁴-2.0×10⁵ v/v, between 1:8.0×10⁴-1:1.5×10⁵ v/v, about 1:8.0×10⁴ v/v, about 1:1.0×1.0⁵ v/v, or about 1:1.5×10⁵ v/v.

7. The method of any one of claims 1-6, wherein the ratio of expression BIICs introduced into the bioreactor relative payload BIICs introduced into the bioreactor is between 1:1-5:1, between 2:1-4:1, between 2.5:1-3.5:1, or about 3:1.

8. The method of any one of claims 1-7, wherein the one or more clarification filtration steps comprises processing the viral production pool through a depth filtration system, a 0.2 μm microfiltration system, or a combination thereof.

9. The method of any one of claims 1-7, wherein the one or more clarification filtration steps comprises processing the viral production pool through a depth filtration system and then a 0.2 μm microfiltration system.

10. The method of any one of claims 1-7, wherein the one or more clarification filtration steps comprises processing the viral production pool through a first depth filtration system, then a second depth filtration system, and then a 0.2 μm microfiltration system.

11. The method of any one of claims 1-10, wherein the one or more affinity chromatography steps comprises processing the viral production pool through one or more immunoaffinity chromatography systems in bind -elute mode; wherein the immunoaffinity chromatography system comprises one or more recombinant single-chain antibodies which are capable of binding to one or more AAV capsid variants.

12. The method of claim 11, wherein the affinity chromatography system comprises an AVB column resin, AAV9 column resin or AAVX column resin.

13. The method of any one of claims 1-12, wherein the one or more ion exchange chromatography steps comprises processing the viral production pool through one or more anion exchange chromatography systems in flow-through mode; wherein the anion exchange chromatography system comprises a stationary phase which binds non-viral impurities, non-AAV viral particles, or a combination thereof: and wherein the stationary phase of the anion exchange chromatography system does not hind to the one or more rAAVs in the viral production pool.

14. The method of claim 13, wherein the stationary phase of the anion exchange chromatography system comprises a quaternary amine functional group or a trimethylammonium ethyl (TMAE) functional group.

15. The method of any one of claims 1-14, wherein a 50% sucrose mixture is added to the viral production pool at a centration between 9-13% v/v prior to the one or more IFF steps.

16. The method of any one of claims 1-15, wherein the one or more TFF steps comprises a first diafiltration step in which at least a portion of the liquid media of the viral production pool is replaced with a low-sucrose diafiltration buffer, wherein the low-sucrose diafiltration buffer comprises between 4-6% w/v of a sugar or sugar substitute and between 150-250 mM of an alkali chloride salt, preferably between 4.5-5.5% w/v of sucrose and between 210-230 mM sodium chloride, and more preferably 5% w/v of sucrose and 220 mM sodium chloride.

17. The method of any one of claims 1-16, wherein the one or more TFF steps comprises an ultrafiltration concentration step, wherein the AAV particles in the viral production pool are concentrated to between 1.0×10¹²-5.0×10¹³ vg/mL, between 1.0-5.0×10¹³ vg/mL, between 2.0-3.0×10¹³ vg/mL, or about 2.7×10¹³ vg/mL.

18. The method of any one of claims 1-17, wherein the one or more TFF steps comprises a formulation diafiltration step in which at least a portion of the liquid media of the viral production pool is replaced with a high-sucrose formulation buffer, wherein the high-sucrose formulation buffer comprises between 6-8% w/v of a sugar or sugar substitute and between 90-100 mM of an alkali chloride salt, preferably 7% w/v of sucrose and between 90-100 mM sodium chloride, and more preferably 7% w/v of sucrose, 10 mM sodium phosphate, between 95-100 mM sodium chloride, and 0.001% w/v) Poloxamer 188.

19. The method of any one of claims 1-18, wherein the VRF system comprises a filter medium that retains particles that are 35 nm or larger, or a filter medium that retains particles that are 20 nm or larger.

20. A method of producing a pharmaceutical formulation, comprising. providing one or more rAAVs produced by the method of any one of claims 1-19; and (ii) combining the one or more rAAVs with one or more one pharmaceutical excipient.

21. A pharmaceutical formulation produced by the method of claim 20.

22. A method of producing a gene therapy product, comprising: (i) providing the pharmaceutical formulation of claim 21; and (ii) suitably aliquoting the pharmaceutical formulation into a formulation container.
